(19) United States
(12) Patent Application Publication
(10) Pub. No.: US 2005/0214781 A1
(43) Pub. Date: Sep. 29, 2005

(54) Compositions, splice variants and methods relating to ovarian specific nucleic acids and proteins

(76) Inventors: Roberto A. Macina, San Jose, CA (US); Leah R. Turner, Sunnyvale, CA (US); Yongming Sun, Redwood City, CA (US)

Correspondence Address: Licata & Tyrrell P.C., 66 East Main Street, Marlton, NJ, 08053, US

(21) Appl. No.: 10/858,412

(22) Filed: Jun. 1, 2004

Related U.S. Application Data
(60) Provisional application No. 60/474,854, filed on May 30, 2003.

(51) Int. Cl. C12Q 1/68; C07H 21/04; C07K 14/72

(52) U.S. Cl. 435/6; 530/350; 536/23.5; 435/69.1; 435/320.1; 435/325

(57) ABSTRACT

The present invention relates to newly identified nucleic acid molecules and polypeptides present in normal and neoplastic ovarian cells, including fragments, variants and derivatives of the nucleic acids and polypeptides. The present invention also relates to antibodies to the polypeptides of the invention, as well as agonists and antagonists of the polypeptides of the invention. The invention also relates to compositions containing the nucleic acid molecules, polypeptides, antibodies, agonists and antagonists of the invention and methods for the use of these compositions. These uses include identifying, diagnosing, monitoring, staging, imaging and treating ovarian cancer and non-cancerous disease states in ovarian, identifying ovarian tissue, monitoring and identifying and/or designing agonists and antagonists of polypeptides of the invention. The uses also include gene therapy, production of transgenic animals and cells, and production of engineered ovarian tissue for treatment and research.

[0001] This patent application claims the benefit of priority from U.S. Provisional Patent Application Ser. No. 60/474,854, filed May 30, 2003, which is herein incorporated by reference in its entirety.

### FIELD OF THE INVENTION

[0002] The present invention relates to newly identified nucleic acids and polypeptides present in normal and neoplastic ovarian cells, including fragments, variants and derivatives of the nucleic acids and polypeptides. The present invention also relates to antibodies to the polypeptides of the invention, as well as agonists and antagonists of the polypeptides of the invention. The invention also relates to compositions comprising the nucleic acids, polypeptides, antibodies, post translational modifications (PTMs), variants, derivatives, agonists and antagonists of the invention and methods for the use of these compositions. These uses include identifying, diagnosing, monitoring, staging, imaging and treating ovarian cancer and non-cancerous disease states in ovarian, identifying ovarian tissue and monitoring and identifying and/or designing agonists and antagonists of polypeptides of the invention. The uses also include gene therapy, therapeutic molecules including but limited to antibodies or antisense molecules, production of transgenic animals and cells, and production of engineered ovarian tissue for treatment and research.

### BACKGROUND OF THE INVENTION

Ovarian Cancer

[0003] Cancer of the ovaries is the fourth-most common cause of cancer death in women in the United States, with more than 23,000 new cases and roughly 14,000 deaths predicted for the year 2001. Shridhar, V. et al., Cancer Res. 61(15): 5895-904 (2001); Memarzadeh, S. & Berek, J. S., J. Reprod. Med. 46(7): 621-29 (2001). The American Cancer Society estimates that there will be about 25,580 new cases of ovarian cancer in 2004 in the United States alone. Ovarian cancer will cause about 16,090 deaths in the United States in the same year. ACS Website: cancer with the extension org of the world wide web. The incidence of ovarian cancer is of serious concern worldwide, with an estimated 191,000 new cases predicted annually. Runnebaum, I. B. & Stickeler, E., J. Cancer Res. Clin. Oncol. 127(2): 73-79 (2001). Unfortunately, women with ovarian cancer are typically asymptomatic until the disease has metastasized. Because effective screening for ovarian cancer is not available, roughly 70% of women diagnosed have an advanced stage of the cancer with a five-year survival rate of 25-30%. Memarzadeh, S. & Berek, J. S., supra; Nunns, D. et al., Obstet. Gynecol. Surv. 55(12): 746-51. Conversely, women diagnosed with early stage ovarian cancer enjoy considerably higher survival rates. Werness, B. A. & Eltabbakh, G. H., Int'l. J. Gynecol. Pathol. 20(1): 48-63 (2001). Although our understanding of the etiology of ovarian cancer is incomplete, the results of extensive research in this area point to a combination of age, genetics, reproductive, and dietary/environmental factors. Age is a key risk factor in the development of ovarian cancer: while the risk for developing ovarian cancer before the age of 30 is slim, the incidence of ovarian cancer rises linearly between ages 30 to 50, increasing at a slower rate thereafter, with the highest incidence being among septagenarian women. Jeanne M. Schilder et al., Hereditary Ovarian Cancer. Clinical Syndromes and Management, in Ovarian Cancer 182 (Stephen C. Rubin & Gregory P. Sutton eds., 2d ed. 2001).

[0004] With respect to genetic factors, a family history of ovarian cancer is the most significant risk factor in the development of the disease, with that risk depending on the number of affected family members, the degree of their relationship to the woman, and which particular first degree relatives are affected by the disease. Id. Mutations in several genes have been associated with ovarian cancer, including BRCA1 and BRCA2, both of which play a key role in the development of breast cancer, as well as hMSH2 and hMLH 1, both of which are associated with hereditary non-polyposis colon cancer. Katherine Y. Look, Epidemiology, Etiology, and Screening of Ovarian Cancer, in Ovarian Cancer 169, 171-73 (Stephen C. Rubin & Gregory P. Sutton eds., 2d ed. 2001). BRCA1, located on chromosome 17, and BRCA2, located on chromosome 13, are tumor suppressor genes implicated in DNA repair; mutations in these genes are linked to roughly 10% of ovarian cancers. Id. at 171-72; Schilder et al., supra at 185-86. hMSH2 and hMLH1 are associated with DNA mismatch repair, and are located on chromosomes 2 and 3, respectively; it has been reported that roughly 3% of hereditary ovarian carcinomas are due to mutations in these genes. Look, supra at 173; Schilder et al., supra at 184, 188-89.

[0005] Reproductive factors have also been associated with an increased or reduced risk of ovarian cancer. Late menopause, nulliparity, and early age at menarche have all been linked with an elevated risk of ovarian cancer. Schilder et al., supra at 182. One theory hypothesizes that these factors increase the number of ovulatory cycles over the course of a woman's life, leading to “incessant ovulation,” which is thought to be the primary cause of mutations to the ovarian epithelium. Id.; Laura J. Havrilesky & Andrew Berchuck, Molecular Alterations in Sporadic Ovarian Cancer, in Ovarian Cancer 25 (Stephen C. Rubin & Gregory P. Sutton eds., 2d ed. 2001). The mutations may be explained by the fact that ovulation results in the destruction and repair of that epithelium, necessitating increased cell division, thereby increasing the possibility that an undetected mutation will occur. Id. Support for this theory may be found in the fact pregnancy, lactation, and the use of oral contraceptives, all of which suppress ovulation, confer a protective effect with respect to developing ovarian cancer. Id.

[0006] Among dietary/environmental factors, there would appear to be an association between high intake of animal fat or red meat and ovarian cancer, while the antioxidant Vitamin A, which prevents free radical formation and also assists in maintaining normal cellular differentiation, may offer a protective effect. Look, supra at 169. Reports have also associated asbestos and hydrous magnesium trisilicate (talc), the latter of which may be present in diaphragms and sanitary napkins. Id. at 169-70.

[0007] Current screening procedures for ovarian cancer, while of some utility, are quite limited in their diagnostic ability, a problem that is particularly acute at early stages of cancer progression when the disease is typically asymptomatic yet is most readily treated. Walter J. Burdette, Cancer: Etiology, Diagnosis and Treatment 166 (1998); Memarzadeh & Berek, supra; Runnebaum & Stickeler, supra; Wemess & Eltabbakh, supra. Commonly used screening tests include biannual rectovaginal pelvic examination, radioimmunoassay to detect the CA-125 serum tumor marker, and transvaginal ultrasonography. Burdette, supra at 166.

[0008] Pelvic examination has failed to yield adequate numbers of early diagnoses, and the other methods are not sufficiently accurate. Id. One study reported that only 15% of patients who suffered from ovarian cancer were diagnosed with the disease at the time of their pelvic examination. Look, supra at 174. Moreover, the CA-125 test is prone to giving false positives in pre-menopausal women and has been reported to be of low predictive value in post-menopausal women. Id. at 174-75. Although transvaginal ultrasonography is now the preferred procedure for screening for ovarian cancer, it is unable to distinguish reliably between benign and malignant tumors, and also cannot locate primary peritoneal malignancies or ovarian cancer if the ovary size is normal. Schilder et al., supra at 194-95. While genetic testing for mutations of the BRCA1, BRCA2, hMSH2, and HMLH1 genes is now available, these tests may be too costly for some patients and may also yield false negative or indeterminate results. Schilder et al., supra at 191-94.

[0009] Other markers of interest are HE4 and mesothelin, see Urban et al. Ovarian cancer screening Hematol Oncol Clin North Am. August 2003;17(4):989-1005; Hellstrom et al. The HE4 (WFDC2) protein is a biomarker for ovarian carcinoma, Cancer Res. July 2003 1;63(13):3695-700; Ordonez, Application of mesothelin immunostaining in tumor diagnosis, Am J Surg Pathol. November 2003;27(11):1418-28.

[0010] The staging of ovarian cancer, which is accomplished through surgical exploration, is crucial in determining the course of treatment and management of the disease. AJCC Cancer Staging Handbook 187 (Irvin D. Fleming et al. eds., 5th ed. 1998); Burdette, supra at 170; Memarzadeh & Berek, supra; Shridhar et al., supra. Staging is performed by reference to the classification system developed by the International Federation of Gynecology and Obstetrics. David H. Moore, Primary Surgical Management of Early Epithelial Ovarian Carcinoma, in Ovarian Cancer 203 (Stephen C. Rubin & Gregory P. Sutton eds., 2d ed. 2001); Fleming et al. eds., supra at 188. Stage I ovarian cancer is characterized by tumor growth that is limited to the ovaries and is comprised of three substages. Id. In substage IA, tumor growth is limited to one ovary, there is no tumor on the external surface of the ovary, the ovarian capsule is intact, and no malignant cells are present in ascites or peritoneal washings. Id. Substage IB is identical to A1, except that tumor growth is limited to both ovaries. Id. Substage IC refers to the presence of tumor growth limited to one or both ovaries, and also includes one or more of the following characteristics: capsule rupture, tumor growth on the surface of one or both ovaries, and malignant cells present in ascites or peritoneal washings. Id.

[0011] Stage II ovarian cancer refers to tumor growth involving one or both ovaries, along with pelvic extension. Id. Substage IIA involves extension and/or implants on the uterus and/or fallopian tubes, with no malignant cells in the ascites or peritoneal washings, while substage IIB involves extension into other pelvic organs and tissues, again with no malignant cells in the ascites or peritoneal washings. Id. Substage IIC involves pelvic extension as in IIA or IIB, but with malignant cells in the ascites or peritoneal washings. Id.

[0012] Stage III ovarian cancer involves tumor growth in one or both ovaries, with peritoneal metastasis beyond the pelvis confirmed by microscope and/or metastasis in the regional lymph nodes. Id. Substage IIIA is characterized by microscopic peritoneal metastasis outside the pelvis, with substage IIIB involving macroscopic peritoneal metastasis outside the pelvis 2 cm or less in greatest dimension. Id. Substage IIIC is identical to IIIB, except that the metastasis is greater than 2 cm in greatest dimension and may include regional lymph node metastasis. Id. Lastly, Stage IV refers to the presence distant metastasis, excluding peritoneal metastasis. Id.

[0013] While surgical staging is currently the benchmark for assessing the management and treatment of ovarian cancer, it suffers from considerable drawbacks, including the invasiveness of the procedure, the potential for complications, as well as the potential for inaccuracy. Moore, supra at 206-208, 213. In view of these limitations, attention has turned to developing alternative staging methodologies through understanding differential gene expression in various stages of ovarian cancer and by obtaining various biomarkers to help better assess the progression of the disease. Vartiainen, J. et al., Int'l J. Cancer, 95(5): 313-16 (2001); Shridhar et al. supra; Baekelandt, M. et al., J. Clin. Oncol. 18(22): 3775-81.

[0014] The treatment of ovarian cancer typically involves a multiprong attack, with surgical intervention serving as the foundation of treatment. Dennis S. Chi & William J. Hoskins, Primary Surgical Management of Advanced Epithelial Ovarian Cancer, in Ovarian Cancer 241 (Stephen C. Rubin & Gregory P. Sutton eds., 2d ed. 2001). For example, in the case of epithelial ovarian cancer, which accounts for ˜90% of cases of ovarian cancer, treatment typically consists of: (1) cytoreductive surgery, including total abdominal hysterectomy, bilateral salpingo-oophorectomy, omentectomy, and lymphadenectomy, followed by (2) adjuvant chemotherapy with paclitaxel and either cisplatin or carboplatin. Eltabbakh, G. H. & Awtrey, C. S., Expert Op. Pharmacother. 2(10): 109-24. Despite a clinical response rate of 80% to the adjuvant therapy, most patients experience tumor recurrence within three years of treatment. Id. Certain patients may undergo a second cytoreductive surgery and/or second-line chemotherapy. Memarzadeh & Berek, supra.

[0015] From the foregoing, it is clear that procedures used for detecting, diagnosing, monitoring, staging, prognosticating, and preventing the recurrence of ovarian cancer are of critical importance to the outcome of the patient. Moreover, current procedures, while helpful in each of these analyses, are limited by their specificity, sensitivity, invasiveness, and/or their cost. As such, highly specific and sensitive procedures that would operate by way of detecting novel markers in cells, tissues, or bodily fluids, with minimal invasiveness and at a reasonable cost, would be highly desirable.

[0016] Accordingly, there is a great need for more sensitive and accurate methods for predicting whether a person is likely to develop ovarian cancer, for diagnosing ovarian cancer, for monitoring the progression of the disease, for staging the ovarian cancer, for determining whether the ovarian cancer has metastasized, for imaging the ovarian cancer and for better treatment of ovarian cancer.

Colorectal Cancer

[0017] Colorectal cancer is the second most common cause of cancer death in the United States and the third most prevalent cancer in both men and women. M. L. Davila & A. D. Davila, Screening for Colon and Rectal Cancer, in Colon and Rectal Cancer 47 (Peter S. Edelstein ed., 2000). The American Cancer Society estimates that there will be about 106,370 new cases of colon cancer and 40,570 new cases of rectal cancer in the 2004 in the United States alone. Colon cancer and rectal cancer will cause about 56,730 deaths combined in the United States. ACS Website: cancer with the extension .org of the world wide web. Nearly all cases of colorectal cancer arise from adenomatous polyps, some of which mature into large polyps, undergo abnormal growth and development, and ultimately progress into cancer. Davila at 55-56. This progression would appear to take at least 10 years in most patients, rendering it a readily treatable form of cancer if diagnosed early, when the cancer is localized. Davila at 56; Walter J. Burdette, Cancer: Etiology Diagnosis, and Treatment 125 (1998).

[0018] Although our understanding of the etiology of colon cancer is undergoing continual refinement, extensive research in this area points to a combination of factors, including age, hereditary and nonhereditary conditions, and environmental/dietary factors. Age is a key risk factor in the development of colorectal cancer, Davila at 48, with men and women over 40 years of age become increasingly susceptible to that cancer, Burdette at 126. Incidence rates increase considerably in each subsequent decade of life. Davila at 48. A number of hereditary and nonhereditary conditions have also been linked to a heightened risk of developing colorectal cancer, including familial adenomatous polyposis (FAP), hereditary nonpolyposis colorectal cancer (Lynch syndrome or HNPCC), a personal and/or family history of colorectal cancer or adenomatous polyps, inflammatory bowel disease, diabetes mellitus, and obesity. Id. at 47; Henry T. Lynch & Jane F. Lynch, Hereditary Nonpolyposis Colorectal Cancer (Lynch Syndromes), in Colon and Rectal Cancer 67-68 (Peter S. Edelstein ed., 2000).

[0019] Environmental/dietary factors associated with an increased risk of colorectal cancer include a high fat diet, intake of high dietary red meat, and sedentary lifestyle. Davila at 47; Reddy, B. S., Prev. Med. 16(4): 460-7 (1987). Conversely, environmental/dietary factors associated with a reduced risk of colorectal cancer include a diet high in fiber, folic acid, calcium, and hormone-replacement therapy in post- menopausal women. Davila at 50-55. The effect of antioxidants in reducing the risk of colon cancer is unclear. Davila at 53.

[0020] Because colon cancer is highly treatable when detected at an early, localized stage, screening should be a part of routine care for all adults starting at age 50, especially those with first-degree relatives with colorectal cancer. One major advantage of colorectal cancer screening over its counterparts in other types of cancer is its ability to not only detect precancerous lesions, but to remove them as well. Davila at 56. The key colorectal cancer screening tests in use today are fecal occult blood test, sigmoidoscopy, colonoscopy, double-contrast barium enema, and the carcinoembryonic antigen (CEA) test. Burdette at 125; Davila at 56.

[0021] The fecal occult blood test (FOBT) screens for colorectal cancer by detecting the amount of blood in the stool, the premise being that neoplastic tissue, particularly malignant tissue, bleeds more than typical mucosa, with the amount of bleeding increasing with polyp size and cancer stage. Davila at 56-57. While effective at detecting early stage tumors, FOBT is unable to detect adenomatous polyps (premalignant lesions), and, depending on the contents of the fecal sample, is subject to rendering false positives. Davila at 56-59. Sigmoidoscopy and colonoscopy, by contrast, allow direct visualization of the bowel, and enable one to detect, biopsy, and remove adenomatous polyps. Davila at 59-60, 61. Despite the advantages of these procedures, there are accompanying downsides: sigmoidoscopy, by definition, is limited to the sigmoid colon and below, colonoscopy is a relatively expensive procedure, and both share the risk of possible bowel perforation and hemorrhaging. Davila at 59-60. Double-contrast barium enema (DCBE) enables detection of lesions better than FOBT, and almost as well a colonoscopy, but it may be limited in evaluating the winding rectosigmoid region. Davila at 60. The CEA blood test, which involves screening the blood for carcinoembryonic antigen, shares the downside of FOBT, in that it is of limited utility in detecting colorectal cancer at an early stage. Burdette at 125.

[0022] Once colon cancer has been diagnosed, treatment decisions are typically made in reference to the stage of cancer progression. A number of techniques are employed to stage the cancer (some of which are also used to screen for colon cancer), including pathologic examination of resected colon, sigmoidoscopy, colonoscopy, and various imaging techniques. AJCC Cancer Staging Handbook 84 (Irvin D. Fleming et al. eds., 5^{th} ed. 1998); Montgomery, R. C. and Ridge, J. A., Semin. Surg. Oncol. 15(3): 143-150 (1998). Moreover, chest films, liver functionality tests, and liver scans are employed to determine the extent of metastasis. Fleming at 84. While computerized tomography and magnetic resonance imaging are useful in staging colorectal cancer in its later stages, both have unacceptably low staging accuracy for identifying early stages of the disease, due to the difficulty that both methods have in (1) revealing the depth of bowel wall tumor infiltration and (2) diagnosing malignant adenopathy. Thoeni, R. F., Radiol. Clin. N. Am. 35(2): 457-85 (1997). Rather, techniques such as transrectal ultrasound (TRUS) are preferred in this context, although this technique is inaccurate with respect to detecting small lymph nodes that may contain metastases. David Blumberg & Frank G. Opelka, Neoadjuvant and Adjuvant Therapy for Adenocarcinoma of the Rectum, in Colon and Rectal Cancer 316 (Peter S. Edelstein ed., 2000).

[0023] Several classification systems have been devised to stage the extent of colorectal cancer, including the Dukes' system and the more detailed International Union against Cancer-American Joint Committee on Cancer TNM staging system, which is considered by many in the field to be a more useful staging system. Burdette at 126-27. The TNM system, which is used for either clinical or pathological staging, is divided into four stages, each of which evaluates the extent of cancer growth with respect to primary tumor (T), regional lymph nodes (N), and distant metastasis (M). Fleming at 84-85. The system focuses on the extent of tumor invasion into the intestinal wall, invasion of adjacent structures, the number of regional lymph nodes that have been affected, and whether distant metastasis has occurred. Fleming at 81.

[0024] Stage 0 is characterized by in situ carcinoma (Tis), in which the cancer cells are located inside the glandular basement membrane (intraepithelial) or lamina propria (intramucosal). In this stage, the cancer has not spread to the regional lymph nodes (N0), and there is no distant metastasis (M0). In stage I, there is still no spread of the cancer to the regional lymph nodes and no distant metastasis, but the tumor has invaded the submucosa (T1) or has progressed further to invade the muscularis propria (T2). Stage II also involves no spread of the cancer to the regional lymph nodes and no distant metastasis, but the tumor has invaded the subserosa, or the nonperitonealized pericolic or perirectal tissues (T3), or has progressed to invade other organs or structures, and/or has perforated the visceral peritoneum (T4). Stage III is characterized by any of the T substages, no distant metastasis, and either metastasis in 1 to 3 regional lymph nodes (N1) or metastasis in four or more regional lymph nodes (N2). Lastly, stage IV involves any of the T or N substages, as well as distant metastasis. Fleming at 84-85; Burdette at 127.

[0025] Currently, pathological staging of colon cancer is preferable over clinical staging as pathological staging provides a more accurate prognosis. Pathological staging typically involves examination of the resected colon section, along with surgical examination of the abdominal cavity. Fleming at 84. Clinical staging would be a preferred method of staging were it at least as accurate as pathological staging, as it does not depend on the invasive procedures of its counterpart.

[0026] Turning to the treatment of colorectal cancer, surgical resection results in a cure for roughly 50% of patients. Irradiation is used both preoperatively and postoperatively in treating colorectal cancer. Chemotherapeutic agents, particularly 5-fluorouracil, are also powerful weapons in treating colorectal cancer. Other agents include irinotecan and floxuridine, cisplatin, levamisole, methotrexate, interferon-α, and leucovorin. Burdette at 125, 132-33. Nonetheless, thirty to forty percent of patients will develop a recurrence of colon cancer following surgical resection, which in many patients is the ultimate cause of death. Wayne De Vos, Follow-up After Treatment of Colon Cancer, Colon and Rectal Cancer 225 (Peter S. Edelstein ed., 2000). Accordingly, colon cancer patients must be closely monitored to determine response to therapy and to detect persistent or recurrent disease and metastasis.

[0027] The next few paragraphs describe the some of molecular bases of colon cancer. In the case of FAP, the tumor suppressor gene APC (adenomatous polyposis coli), chromosomally located at 5q21, has been either inactivated or deleted by mutation. Alberts et al., Molecular Biology of the Cell 1288 (3d ed. 1994). The APC protein plays a role in a number of functions, including cell adhesion, apoptosis, and repression of the c-myc oncogene. N. R. Hall & R. D. Madoff, Genetics and the Polyp-Cancer Sequence, Colon and Rectal Cancer 8 (Peter S. Edelstein, ed., 2000). Of those patients with colorectal cancer who have normal APC genes, over 65% have such mutations in the cancer cells but not in other tissues. Alberts et al., supra at 1288. In the case of HPNCC, patients manifest abnormalities in the tumor suppressor gene HNPCC, but only about 15% of tumors contain the mutated gene. Id. A host of other genes have also been implicated in colorectal cancer, including the K-ras, N-ras, H-ras and c-myc oncogenes, and the tumor suppressor genes DCC (deleted in colon carcinoma) and p53. Hall & Madoff, supra at 8-9; Alberts et al., supra at 1288.

[0028] Abnormalities in Wg/Wnt signal transduction pathway are also associated with the development of colorectal carcinoma. Taipale, J. and Beachy, P.A. Nature 411: 349-354 (2001). Wntl is a secreted protein gene originally identified within mouse mammary cancers by its insertion into the mouse mammary tumor virus (MMTV) gene. The protein is homologous to the wingless (Wg) gene product of Drosophila, in which it functions as an important factor for the determination of dorsal-ventral segmentation and regulates the formation of fly imaginal discs. Wg/Wnt pathway controls cell proliferation, death and differentiation. Taipal (2001). There are at least 13 members in the Wnt family. These proteins have been found expressed mainly in the central nervous system (CNS) of vertebrates as well as other tissues such as mammary and intestine. The Wnt proteins are the ligands for a family of seven transmembrane domain receptors related to the Frizzled gene product in Drosophila. Binding Wnt to Frizzled stimulates the activity of the downstream target, Dishevelled, which in turn inactivates the glycogen synthesase kinase 3β (GSK3β). Taipal (2001). Usually active GSK3β will form a complex with the adenomatous polyposis coli (APC) protein and phosphorylate another complex member, β-catenin. Once phosphorylated, β-catenin is directed to degradation through the ubiquitin pathway. When GSK3β or APC activity is down regulated, β-catenin is accumulated in the cytoplasm and binds to the T-cell factor or lymphocyte excitation factor (Tcf/Lef) family of transcriptional factors. Binding of β-catenin to Tcf releases the transcriptional repression and induces gene transcription. Among the genes regulated by β-catenin are a transcriptional repressor Engrailed, a transforming growth factor-β (TGF-β) family member Decapentaplegic, and the cytokine Hedgehog in Drosophila. β-Catenin also involves in regulating cell adhesion by binding to α-catenin and E-cadherin. On the other hand, binding of β-catenin to these proteins controls the cytoplasmic β-catenin level and its complexing with TCF. Taipal (2001). Growth factor stimulation and activation of c-src or v-src also regulate β-catenin level by phosphorylation of α-catenin and its related protein, p120^{cas}. When phosphorylated, these proteins decrease their binding to E-cadherin and β-catenin resulting in the accumulation of cytoplasmic β-catenin. Reynolds, A. B. et al. Mol. Cell Biol. 14: 8333-8342 (1994). In colon cancer, c-src enzymatic activity has been shown increased to the level of v-src. Alternation of components in the Wg/Wnt pathway promotes colorectal carcinoma development. The best known modifications are to the APC gene. Nicola S et al. Hum. Mol. Genet 10:721-733 (2001). This germline mutation causes the appearance of hundreds to thousands of adenomatous polyps in the large bowel. It is the gene defect that accounts for the autosomally dominantly inherited FAP and related syndromes. The molecular alternations that occur in this pathway largely involve deletions of alleles of tumor-suppressor genes, such as APC, p53 and Deleted in Colorectal Cancer (DCC), combined with mutational activation of proto-oncogenes, especially c-Ki-ras. Aoki, T. et al. Human Mutat. 3: 342-346 (1994). All of these lead to genomic instability in colorectal cancers.

[0029] Another source of genomic instability in colorectal cancer is the defect of DNA mismatch repair (MMR) genes. Human homologues of the bacterial mutHLS complex (hMSH2, hMLH1, hPMS1, hPMS2 and hMSH6), which is involved in the DNA mismatch repair in bacteria, have been shown to cause the HNPCC (about 70-90% HNPCC) when mutated. Modrich, P. and Lahue, R. Ann Rev. Biochem. 65: 101-133 (1996); and Peltomäki, P. Hum. Mol. Genet 10: 735-740 (2001). The inactivation of these proteins leads to the accumulation of mutations and causes genetic instability that represents errors in the accurate replication of the repetitive mono-, di-, tri- and tetra-nucleotide repeats, which are scattered throughout the genome (microsatellite regions). Jass, J. R. et al. J. Gastroenterol Hepatol 17: 17-26 (2002). Like in the classic FAP, mutational activation of c-Ki-ras is also required for the promotion of MSI in the alternative HNPCC. Mutations in other proteins such as the tumor suppressor protein phosphatase PTEN (Zhou, X.P. et al. Hum. Mol. Genet 11: 445-450 (2002)), BAX (Buttler, L. M. Aus. N. Z. J. Surg. 69: 88-94 (1999)), Caspase-5 (Planck, M. Cancer Genet Cytogenet. 134: 46-54 (2002)), TGFβ-RII (Fallik, D. et al. Gastroenterol Clin Biol. 24: 917-22 (2000)) and IGFII-R (Giovannucci E. J. Nutr. 131: 3109S-20S (2001)) have also been found in some colorectal tumors possibly as the cause of MMR defect.

[0030] Some tyrosine kinases have been shown up-regulated in colorectal tumor tissues or cell lines like HT29. Skoudy, A. et al. Biochem J. 317 (Pt 1): 279-84 (1996). Focal adhesion kinase (FAK) and its up-stream kinase c-src and c-yes in colonic epithelia cells may play an important role in the promotion of colorectal cancers through the extracellular matrix (ECM) and integrin-mediated signaling pathways. Jessup, J.M. et al., The molecular biology of colorectal carcinoma, in. The Molecular Basis of Human Cancer, 251-268 (Coleman W. B. and Tsongalis G. J. Eds. 2002). The formation of c-src/FAK complexes may coordinately deregulate VEGF expression and apoptosis inhibition. Recent evidences suggest that a specific signal-transduction pathway for cell survival that implicates integrin engagement leads to FAK activation and thus activates PI-3 kinase and akt. In turn, akt phosphorylates BAD and blocks apoptosis in epithelial cells. The activation of c-src in colon cancer may induce VEGF expression through the hypoxia pathway. Other genes that may be implicated in colorectal cancer include Cox enzymes (Ota, S. et al. Aliment Pharmacol. Ther. 16 (Suppl 2): 102-106 (2002)), estrogen (al-Azzawi, F. and Wahab, M. Climacteric 5: 3-14 (2002)), peroxisome proliferator-activated receptor-γ (PPAR-γ) (Gelman, L. et al. Cell Mol. Life Sci. 55: 932-943 (1999)), IGF-I (Giovannucci (2001)), thymine DNA glycosylase (TDG) (Hardeland, U. et al. Prog. Nucleic Acid Res. Mol. Biol. 68: 235-253 (2001)) and EGF (Mendelsohn, J. Endocrine-Related Cancer 8: 3-9 (2001)).

[0031] Gene deletion and mutation are not the only causes for development of colorectal cancers. Epigenetic silencing by DNA methylation also accounts for the lost of function of colorectal cancer suppressor genes. A strong association between MSI and CpG island methylation has been well characterized in sporadic colorectal cancers with high MSI but not in those of hereditary origin. In one experiment, DNA methylation of MLH1, CDKN2A, MGMT, THBS1, RARB, APC, and p14ARF genes has been shown in 80%, 55%, 23%, 23%, 58%, 35%, and 50% of 40 sporadic colorectal cancers with high MSI respectively. Yamamoto, H. et al. Genes Chromosomes Cancer 33: 322-325 (2002); and Kim, K. M. et al. Oncogene. 12;21(35): 5441-9 (2002). Carcinogen metabolism enzymes such as GST, NAT, CYP and MTHFR are also associated with an increased or decreased colorectal cancer risk. Pistorius, S. et al. Kongressbd Dtsch Ges Chir Kongr 118: 820-824 (2001); and Potter, J. D. J. Natl. Cancer Inst. 91: 916-932 (1999).

[0032] From the foregoing, it is clear that procedures used for detecting, diagnosing, monitoring, staging, prognosticating, and preventing the recurrence of colorectal cancer are of critical importance to the outcome of the patient. Moreover, current procedures, while helpful in each of these analyses, are limited by their specificity, sensitivity, invasiveness, and/or their cost. As such, highly specific and sensitive procedures that would operate by way of detecting novel markers in cells, tissues, or bodily fluids, with minimal invasiveness and at a reasonable cost, would be highly desirable.

[0033] Accordingly, there is a great need for more sensitive and accurate methods for predicting whether a person is likely to develop colorectal cancer, for diagnosing colorectal cancer, for monitoring the progression of the disease, for staging the colorectal cancer, for determining whether the colorectal cancer has metastasized, and for imaging the colorectal cancer. Following accurate diagnosis, there is also a need for less invasive and more effective treatment of colorectal cancer.

Angiogenesis in Cancer

[0034] Growth and metastasis of solid tumors are also dependent on angiogenesis. Folkman, J., 1986, Cancer Research, 46, 467-473; Folkman, J., 1989, Journal of the National Cancer Institute, 82, 4-6. It has been shown, for example, that tumors which enlarge to greater than 2 mm must obtain their own blood supply and do so by inducing the growth of new capillary blood vessels. Once these new blood vessels become embedded in the tumor, they provide a means for tumor cells to enter the circulation and metastasize to distant sites such as liver, lung or bone. Weidner, N., et al., 1991, The New England Journal of Medicine, 324(1), 1-8.

[0035] Angiogenesis, defined as the growth or sprouting of new blood vessels from existing vessels, is a complex process that primarily occurs during embryonic development. The process is distinct from vasculogenesis, in that the new endothelial cells lining the vessel arise from proliferation of existing cells, rather than differentiating from stem cells. The process is invasive and dependent upon proteolysis of the extracellular matrix (ECM), migration of new endothelial cells, and synthesis of new matrix components. Angiogenesis occurs during embryogenic development of the circulatory system; however, in adult humans, angiogenesis only occurs as a response to a pathological condition (except during the reproductive cycle in women).

[0036] Under normal physiological conditions in adults, angiogenesis takes place only in very restricted situations such as hair growth and wounding healing. Auerbach, W. and Auerbach, R., 1994, Pharmacol Ther. 63(3):265-3 11; Ribatti et al.,1991, Haematologica 76(4):3 11-20; Risau, 1997, Nature 386(6626):67 1-4. Angiogenesis progresses by a stimulus which results in the formation of a migrating column of endothelial cells. Proteolytic activity is focused at the advancing tip of this “vascular sprout”, which breaks down the ECM sufficiently to permit the column of cells to infiltrate and migrate. Behind the advancing front, the endothelial cells differentiate and begin to adhere to each other, thus forming a new basement membrane. The cells then cease proliferation and finally define a lumen for the new arteriole or capillary.

[0037] Unregulated angiogenesis has gradually been recognized to be responsible for a wide range of disorders, including, but not limited to, cancer, cardiovascular disease, rheumatoid arthritis, psoriasis and diabetic retinopathy. Folkman, 1995, Nat Med 1(1):27-31; Isner, 1999, Circulation 99(13): 1653-5; Koch, 1998, Arthritis Rheum 41(6):951-21; Walsh, 1999, Rheumatology (Oxford) 38(2):103-12; Ware and Simons, 1997, Nat Med 3(2): 158-64.

[0038] Of particular interest is the observation that angiogenesis is required by solid tumors for their growth and metastases. Folkman, 1986 supra; Folkman 1990, J Natl. Cancer Inst., 82(1) 4-6; Folkman, 1992, Semin Cancer Biol 3(2):65-71; Zetter, 1998,Annu Rev Med 49:407-24. A tumor usually begins as a single aberrant cell which can proliferate only to a size of a few cubic millimeters due to the distance from available capillary beds, and it can stay ‘dormant’ without further growth and dissemination for a long period of time. Some tumor cells then switch to the angiogenic phenotype to activate endothelial cells, which proliferate and mature into new capillary blood vessels. These newly formed blood vessels not only allow for continued growth of the primary tumor, but also for the dissemination and recolonization of metastatic tumor cells. The precise mechanisms that control the angiogenic switch is not well understood, but it is believed that neovascularization of tumor mass results from the net balance of a multitude of angiogenesis stimulators and inhibitors Folkman, 1995, supra.

[0039] One of the most potent angiogenesis inhibitors is endostatin identified by O'Reilly and Folkman. O'Reilly et al., 1997, Cell 88(2):277-85; O'Reilly et al., 1994, Cell 79(2):3 15-28. Its discovery was based on the phenomenon that certain primary tumors can inhibit the growth of distant metastases. O'Reilly and Folkman hypothesized that a primary tumor initiates angiogenesis by generating angiogenic stimulators in excess of inhibitors. However, angiogenic inhibitors, by virtue of their longer half life in the circulation, reach the site of a secondary tumor in excess of the stimulators. The net result is the growth of primary tumor and inhibition of secondary tumor. Endostatin is one of a growing list of such angiogenesis inhibitors produced by primary tumors. It is a proteolytic fragment of a larger protein: endostatin is a 20 kDa fragment of collagen XVIII (amino acid H1132-K1315 in murine collagen XVIII). Endostatin has been shown to specifically inhibit endothelial cell proliferation in vitro and block angiogenesis in vivo. More importantly, administration of endostatin to tumor-bearing mice leads to significant tumor regression, and no toxicity or drug resistance has been observed even after multiple treatment cycles. Boehm et al., 1997, Nature 390(6658):404-407. The fact that endostatin targets genetically stable endothelial cells and inhibits a variety of solid tumors makes it a very attractive candidate for anticancer therapy. Fidler and Ellis, 1994, Cell 79(2): 185-8; Gastl et al., 1997, Oncology 54(3):177-84; Hinsbergh et al., 1999, Ann Oncol 10 Suppl 4:60-3. In addition, angiogenesis inhibitors have been shown to be more effective when combined with radiation and chemotherapeutic agents. Klement, 2000, J. Clin Invest, 105(8) R15-24. Browder, 2000, Cancer Res. 6-(7) 1878-86, Arap et al., 1998, Science 279(5349):377-80; Mauceri et al., 1998, Nature 394(6690):287-91.

### SUMMARY OF THE INVENTION

[0040] The present invention solves many needs in the art by providing nucleic acid molecules, polypeptides and antibodies thereto, variants and derivatives of the nucleic acids and polypeptides, agonists and antagonists that may be used to identify, diagnose, monitor, stage, image and treat ovarian cancer and non-cancerous disease states in ovarian; identify and monitor ovarian tissue; and identify and design agonists and antagonists of polypeptides of the invention. The invention also provides gene therapy, methods for producing transgenic animals and cells, and methods for producing engineered ovarian tissue for treatment and research.

[0041] One aspect of the present invention relates to nucleic acid molecules that are specific to ovarian cells, ovarian tissue and/or the ovarian organ. These ovarian specific nucleic acids (OSNAs) may be a naturally occurring cDNA, genomic DNA, RNA, or a fragment of one of these nucleic acids, or may be a non-naturally occurring nucleic acid molecule. If the OSNA is genomic DNA, then the OSNA is a ovarian specific gene (OSG). If the OSNA is RNA, then it is a ovarian specific transcript encoded by a OSG. Due to alternative splicing and transcriptional modification one OSG may encode for multiple ovarian specific RNAs. In a preferred embodiment, the nucleic acid molecule encodes a polypeptide that is specific to ovarian. More preferred is a nucleic acid molecule that encodes a polypeptide comprising an amino acid sequence of SEQ ID NO: 101-240. In another preferred embodiment, the nucleic acid molecule comprises a nucleic acid sequence of SEQ ID NO: 1-100. For the OSNA sequences listed herein, DEX0488_{—}001.nt. 1 corresponds to SEQ ID NO: 1. For sequences with multiple splice variants, the parent sequence DEX0488_{—}001.nt. 1, will be followed by DEX0488_{—}001.nt.2, etc. for each splice variant. The sequences off the corresponding peptides are listed as DEX0488_{—}001.aa.1, etc. For the mapping of all of the nucleotides and peptides, see the table in the Example 1 section below.

[0042] This aspect of the present invention also relates to nucleic acid molecules that selectively hybridize or exhibit substantial sequence similarity to nucleic acid molecules encoding a ovarian Specific Protein (OSP), or that selectively hybridize or exhibit substantial sequence similarity to a OSNA. In one embodiment of the present invention the nucleic acid molecule comprises an allelic variant of a nucleic acid molecule encoding a OSP, or an allelic variant of a OSNA. In another embodiment, the nucleic acid molecule comprises a part of a nucleic acid sequence that encodes a OSP or a part of a nucleic acid sequence of a OSNA.

[0043] In addition, this aspect of the present invention relates to a nucleic acid molecule further comprising one or more expression control sequences controlling the transcription and/or translation of all or a part of a OSNA or the transcription and/or translation of a nucleic acid molecule that encodes all or a fragment of a OSP.

[0044] Another aspect of the present invention relates to vectors and/or host cells comprising a nucleic acid molecule of this invention. In a preferred embodiment, the nucleic acid molecule of the vector and/or host cell encodes all or a fragment of a OSP. In another preferred embodiment, the nucleic acid molecule of the vector and/or host cell comprises all or a part of a OSNA. Vectors and host cells of the present invention are useful in the recombinant production of polypeptides, particularly OSPs of the present invention.

[0045] Another aspect of the present invention relates to polypeptides encoded by a nucleic acid molecule of this invention. The polypeptide may comprise either a fragment or a full-length protein. In a preferred embodiment, the polypeptide is a OSP. However, this aspect of the present invention also relates to mutant proteins (muteins) of OSPs, fusion proteins of which a portion is a OSP, and proteins and polypeptides encoded by allelic variants of a OSNA as provided herein.

[0046] A further aspect of the present invention is a novel splice variant which encodes an amino acid sequence that provides a novel region to be targeted for the generation of reagents that can be used in the detection and/or treatment of cancer. The novel amino acid sequence may lead to a unique protein structure, protein subcellular localization, biochemical processing or function. This information can be used to directly or indirectly facilitate the generation of additional or novel therapeutics or diagnostics. The nucleotide sequence in this novel splice variant can be used as a nucleic acid probe for the diagnosis and/or treatment of cancer.

[0047] Another aspect of the present invention relates to antibodies and other binders that specifically bind to a polypeptide of the instant invention. Accordingly antibodies or binders of the present invention specifically bind to OSPs, muteins, fusion proteins, and/or homologous proteins or polypeptides encoded by allelic variants of an OSNA as provided herein.

[0048] Another aspect of the present invention relates to agonists and antagonists of the nucleic acid molecules and polypeptides of this invention. The agonists and antagonists of the instant invention may be used to treat ovarian cancer and non-cancerous disease states in ovarian and to produce engineered ovarian tissue.

[0049] Another aspect of the present invention relates to methods for using the nucleic acid molecules to detect or amplify nucleic acid molecules that have similar or identical nucleic acid sequences compared to the nucleic acid molecules described herein. Such methods are useful in identifying, diagnosing, monitoring, staging, imaging and treating ovarian cancer and non-cancerous disease states in ovarian. Such methods are also useful in identifying and/or monitoring ovarian tissue. In addition, measurement of levels of one or more of the nucleic acid molecules of this invention may be useful for diagnostics as part of panel in combination with known other markers, particularly those described in the ovarian cancer background section above.

[0050] Another aspect of the present invention relates to use of the nucleic acid molecules of this invention in gene therapy, for producing transgenic animals and cells, and for producing engineered ovarian tissue for treatment and research.

[0051] Another aspect of the present invention relates to methods for detecting polypeptides this invention, preferably using antibodies thereto. Such methods are useful to identify, diagnose, monitor, stage, image and treat ovarian cancer and non-cancerous disease states in ovarian. In addition, measurement of levels of one or more of the polypeptides of this invention may be useful to identify, diagnose, monitor, stage, image ovarian cancer in combination with known other markers, particularly those described in the ovarian cancer background section above. The polypeptides of the present invention can also be used to identify and/or monitor ovarian tissue, and to produce engineered ovarian tissue.

[0052] Yet another aspect of the present invention relates to a computer readable means of storing the nucleic acid and amino acid sequences of the invention. The records of the computer readable means can be accessed for reading and displaying of sequences for comparison, alignment and ordering of the sequences of the invention to other sequences. In addition, the computer records regarding the nucleic acid and/or amino acid sequences and/or measurements of their levels may be used alone or in combination with other markers to diagnose ovarian related diseases.

### DETAILED DESCRIPTION OF THE INVENTION

Definitions and General Techniques

[0053] Unless otherwise defined herein, scientific and technical terms used in connection with the present invention shall have the meanings that are commonly understood by those of ordinary skill in the art. Further, unless otherwise required by context, singular terms shall include pluralities and plural terms shall include the singular. Generally, nomenclatures used in connection with, and techniques of, cell and tissue culture, molecular biology, immunology, microbiology, genetics and protein and nucleic acid chemistry and hybridization described herein are those well known and commonly used in the art. The methods and techniques of the present invention are generally performed according to conventional methods well known in the art and as described in various general and more specific references that are cited and discussed throughout the present specification unless otherwise indicated. See, e.g., Sambrook et al., Molecular Cloning: A Laboratory Manual, 2d ed., Cold Spring Harbor Laboratory Press (1989) and Sambrook et al., Molecular Cloning: A Laboratory Manual, 3d ed., Cold Spring Harbor Press (2001); Ausubel et al., Current Protocols in Molecular Biology, Greene Publishing Associates (1992, and Supplements to 2000); Ausubel et al., Short Protocols in Molecular Biology: A Compendium of Methods from Current Protocols in Molecular Biology—4^{th} Ed., Wiley & Sons (1999); Harlow and Lane, Antibodies: A Laboratory Manual, Cold Spring Harbor Laboratory Press (1990); and Harlow and Lane, Using Antibodies: A Laboratory Manual, Cold Spring Harbor Laboratory Press (1999).

[0054] Enzymatic reactions and purification techniques are performed according to manufacturer's specifications, as commonly accomplished in the art or as described herein. The nomenclatures used in connection with, and the laboratory procedures and techniques of, analytical chemistry, synthetic organic chemistry, and medicinal and pharmaceutical chemistry described herein are those well known and commonly used in the art. Standard techniques are used for chemical syntheses, chemical analyses, pharmaceutical preparation, formulation, and delivery, and treatment of patients.

[0055] The following terms, unless otherwise indicated, shall be understood to have the following meanings:

[0056] A “nucleic acid molecule” of this invention refers to a polymeric form of nucleotides and includes both sense and antisense strands of RNA, cDNA, genomic DNA, and synthetic forms and mixed polymers of the above. A nucleotide refers to a ribonucleotide, deoxynucleotide or a modified form of either type of nucleotide. A “nucleic acid molecule” as used herein is synonymous with “nucleic acid” and “polynucleotide.” The term “nucleic acid molecule” usually refers to a molecule of at least 10 bases in length, unless otherwise specified. The term includes single and double stranded forms of DNA. In addition, a polynucleotide may include either or both naturally occurring and modified nucleotides linked together by naturally occurring and/or non-naturally occurring nucleotide linkages.

[0057] Nucleotides are represented by single letter symbols in nucleic acid molecule sequences. The following table lists symbols identifying nucleotides or groups of nucleotides which may occupy the symbol position on a nucleic acid molecule. See Nomenclature Committee of the International Union of Biochemistry (NC-IUB), Nomenclature for incompletely specified bases in nucleic acid sequences, Recommendations 1984., Eur J Biochem. 150(1):1-5 (1985).

| | | | Complementary |
|---|---|---|---|
| Symbol | Meaning | Group/Origin of Designation | Symbol |
| a | a | Adenine | t/u |
| g | g | Guanine | c |
| c | c | Cytosine | g |
| t | t | Thymine | a |
| u | u | Uracil | a |
| r | g or a | puRine | y |
| y | t/u or c | pYrimidine | r |
| m | a or c | aMino | k |
| k | g or t/u | Keto | m |
| s | g or c | Strong interactions 3H - bonds | w |
| w | a or t/u | Weak interactions 2H - bonds | s |
| b | g or c or t/u | not a | v |
| d | a or g or t/u | not c | h |
| h | a or c or t/u | not g | d |
| v | a or g or c | not t, not u | b |
| n | a or g or c | aNy | n |
| | or t/u, | | |
| | unknown, or | | |
| | other | | |

[0058] The nucleic acid molecules may be modified chemically or biochemically or may contain non-natural or derivatized nucleotide bases, as will be readily appreciated by those of skill in the art. Such modifications include, for example, labels, methylation, substitution of one or more of the naturally occurring nucleotides with an analog, intemucleotide modifications such as uncharged linkages (e.g., methyl phosphonates, phosphotriesters, phosphoramidates, carbamates, etc.), charged linkages (e.g., phosphorothioates, phosphorodithioates, etc.), pendent moieties (e.g., polypeptides), intercalators (e.g., acridine, psoralen, etc.), chelators, alkylators, and modified linkages (e.g., alpha anomeric nucleic acids, etc.) The term “nucleic acid molecule” also includes any topological conformation, including single-stranded, double-stranded, partially duplexed, triplexed, hairpinned, circular and padlocked conformations. Also included are synthetic molecules that mimic polynucleotides in their ability to bind to a designated sequence via hydrogen bonding and other chemical interactions. Such molecules are known in the art and include, for example, those in which peptide linkages substitute for phosphate linkages in the backbone of the molecule.

[0059] A “gene” is defined as a nucleic acid molecule that comprises a nucleic acid sequence that encodes a polypeptide and the expression control sequences that surround the nucleic acid sequence that encodes the polypeptide. For instance, a gene may comprise a promoter, one or more enhancers, a nucleic acid sequence that encodes a polypeptide, downstream regulatory sequences and, possibly, other nucleic acid sequences involved in regulation of the expression of an RNA. As is well known in the art, eukaryotic genes usually contain both exons and introns. The term “exon” refers to a nucleic acid sequence found in genomic DNA that is bioinformatically predicted and/or experimentally confirmed to contribute contiguous sequence to a mature mRNA transcript. The term “intron” refers to a nucleic acid sequence found in genomic DNA that is predicted and/or confirmed to not contribute to a mature mRNA transcript, but rather to be “spliced out” during processing of the transcript.

[0060] A nucleic acid molecule or polypeptide is “derived” from a particular species if the nucleic acid molecule or polypeptide has been isolated from the particular species, or if the nucleic acid molecule or polypeptide is homologous to a nucleic acid molecule or polypeptide isolated from a particular species.

[0061] An “isolated” or “substantially pure” nucleic acid or polynucleotide (e.g., an RNA, DNA or a mixed polymer) is one which is substantially separated from other cellular components that naturally accompany the native polynucleotide in its natural host cell, e.g., ribosomes, polymerases, or genomic sequences with which it is naturally associated. The term embraces a nucleic acid or polynucleotide that (1) has been removed from its naturally occurring environment, (2) is not associated with all or a portion of a polynucleotide in which the “isolated polynucleotide” is found in nature, (3) is operatively linked to a polynucleotide which it is not linked to in nature, (4) does not occur in nature as part of a larger sequence or (5) includes nucleotides or intemucleoside bonds that are not found in nature. The term “isolated” or “substantially pure” also can be used in reference to recombinant or cloned DNA isolates, chemically synthesized polynucleotide analogs, or polynucleotide analogs that are biologically synthesized by heterologous systems. The term “isolated nucleic acid molecule” includes nucleic acid molecules that are integrated into a host cell chromosome at a heterologous site, recombinant fusions of a native fragment to a heterologous sequence, recombinant vectors present as episomes or as integrated into a host cell chromosome.

[0062] A “part” of a nucleic acid molecule refers to a nucleic acid molecule that comprises a partial contiguous sequence of at least 10 bases of the reference nucleic acid molecule and can range in length from at least 10 bases up to the full length reference nucleic acid sequence minus one nucleotide base. Thus, for example, when the full length reference nucleic acid molecule contains 1000 nucleotide bases, the part may contain from at least 10 up to 999 nucleotide bases of that reference nucleic acid molecule. Preferably, a part comprises at least 15 to 20 bases of a reference nucleic acid molecule. In theory, a nucleic acid sequence of 17 nucleotides is of sufficient length to occur at random less frequently than once in the three gigabase human genome, and thus to provide a nucleic acid probe that can uniquely identify the reference sequence in a nucleic acid mixture of genomic complexity. A preferred part is thus one which comprises at least 17 nucleotides and provides a nucleic acid probe specific for a reference nucleic acid molecule of the present invention. Another preferred part is one comprising a nucleic acid sequence, the expression of which is indicative of breast cancer. Another preferred part is one that comprises a nucleic acid sequence that can encode at least 6 contiguous amino acid sequences (fragments of at least 18 nucleotides) because they are useful in directing the expression or synthesis of peptides that are useful in mapping the epitopes of the polypeptide encoded by the reference nucleic acid. See, e.g., Geysen et al., Proc. Natl. Acad. Sci. USA 81:3998-4002 (1984); and U.S. Pat. Nos. 4,708,871 and 5,595,915, the disclosures of which are incorporated herein by reference in their entireties. Preferably the 6 contiguous amino acids comprise a contiguous region of amino acids identical to a portion of a BSP of the present invention. A part may also comprise at least 25, 30, 35 or 40 nucleotides of a reference nucleic acid molecule, or at least 50, 60, 70, 80, 90, 100, 150, 200, 250, 300, 350, 400 or 500 nucleotides of a reference nucleic acid molecule. A part of a nucleic acid molecule may comprise no other nucleic acid sequences. Alternatively, a part of a nucleic acid may comprise other nucleic acid sequences from other nucleic acid molecules.

[0063] The termn “oligonucleotide” refers to a nucleic acid molecule generally comprising a length of 200 bases or fewer. A nucleoside, as known by those skilled in the art, is a base-sugar combination. The base portion of a nucleoside is typically a heterocyclic base, the two most common classes of which are purines and the pyrimidines. Nucleotides are nucleosides that further include a phosphate group covalently linked to the sugar portion of the nucleoside. For those nucleosides that include a pentofuranosyl sugar, the phosphate group can be linked to the 2′, 3′ or 5′ hydroxyl moiety of the sugar. In forming oligonucleotides, the phosphate groups covalently link adjacent nucleosides to one another to form a linear polymeric compound. In some embodiments, the respective ends of this linear polymeric structure can be further joined to form a circular structure. Within the oligonucleotide structure, the phosphate groups are commonly referred to as forming the internucleoside backbone of the oligonucleotide. The normal linkage or backbone of RNA and DNA is a 3′ to 5′ phosphodiester linkage. The term “oligonucleotide” often refers to single-stranded deoxyribonucleotides, but it can refer as well to single-or double-stranded ribonucleotides, RNA:DNA hybrids and double-stranded DNAs, among others.

[0064] Preferably, oligonucleotides are 10 to 60 bases in length and most preferably 12, 13, 14, 15, 16, 17, 18, 19 or 20 bases in length. Other preferred oligonucleotides are 25, 30, 35, 40, 45, 50, 55 or 60 bases in length. Oligonucleotides may be single-stranded, e.g. for use as probes or primers, or may be double-stranded, e.g. for use in the construction of a mutant gene. Oligonucleotides of the invention can be either sense or antisense oligonucleotides. An oligonucleotide can be derivatized or modified as discussed herein for nucleic acid molecules.

[0065] Thus, in the context of the present invention, the term “oligonucleotide” refers to an oligomer or polymer of ribonucleic acid (RNA) or deoxyribonucleic acid (DNA) or mimetics thereof. This term includes oligonucleotides composed of naturally-occurring nucleobases, sugars and covalent internucleoside (backbone) linkages as well as oligonucleotides having non-naturally-occurring portions which function similarly. Such modified or substituted oligonucleotides are often preferred over native forms because of desirable properties such as, for example, enhanced cellular uptake, enhanced affinity for a reference nucleic acid molecule and increased stability in the presence of nucleases.

[0066] Oligonucleotides, such as single-stranded DNA probe oligonucleotides, often are synthesized by chemical methods, such as those implemented on automated oligonucleotide synthesizers. However, oligonucleotides can be made by a variety of other methods, including in vitro recombinant DNA-mediated techniques and by expression of DNAs in cells and organisms. Initially, chemically synthesized DNAs typically are obtained without a 5′ phosphate. The 5′ ends of such oligonucleotides are not substrates for phosphodiester bond formation by ligation reactions that employ DNA ligases typically used to form recombinant DNA molecules. Where ligation of such oligonucleotides is desired, a phosphate can be added by standard techniques, such as those that employ a kinase and ATP. The 3′ end of a chemically synthesized oligonucleotide generally has a free hydroxyl group and, in the presence of a ligase, such as T4 DNA ligase, readily will form a phosphodiester bond with a 5′ phosphate of another polynucleotide, such as another oligonucleotide. As is well known, this reaction can be prevented selectively, where desired, by removing the 5′ phosphates of the other polynucleotide(s) prior to ligation.

[0067] Oligonucleotides of the present invention may further include ribozymes, external guide sequence (EGS) , oligozymes, and other short catalytic RNAs or catalytic oligonucleotides which hybridize to the reference nucleic acid molecules.

[0068] The term “naturally occurring nucleotide” referred to herein includes naturally occurring deoxyribonucleotides and ribonucleotides. The term “modified nucleotides” referred to herein includes nucleotides with modified or substituted sugar groups and the like. The term “nucleotide linkages” referred to herein includes nucleotides linkages such as phosphorothioate, phosphorodithioate, phosphoroselenoate, phosphorodiselenoate, phosphoroanilothioate, phoshoraniladate, phosphoroamidate, and the like. See e.g., LaPlanche et al. Nucl. Acids Res. 14:9081-9093 (1986); Stein et al. Nucl. Acids Res. 16:3209-3221 (1988); Zon et al. Anti-Cancer Drug Design 6:539-568 (1991); Zon et al., in Eckstein (ed.) Oligonucleotides and Analogues: A Practical Approach, pp. 87-108, Oxford University Press (1991); Uhlmann and Peyman Chemical Reviews 90:543 (1990), and U.S. Pat. No. 5,151,510, the disclosure of which is hereby incorporated by reference in its entirety.

[0069] Unless specified otherwise, the left hand end of a polynucleotide sequence in sense orientation is the 5′ end and the right hand end of the sequence is the 3′ end. In addition, the left hand direction of a polynucleotide sequence in sense orientation is referred to as the 5′ direction, while the right hand direction of the polynucleotide sequence is referred to as the 3′ direction. Further, unless otherwise indicated, each nucleotide sequence is set forth herein as a sequence of deoxyribonucleotides. It is intended, however, that the given sequence be interpreted as would be appropriate to the polynucleotide composition: for example, if the isolated nucleic acid is composed of RNA, the given sequence intends ribonucleotides, with uridine substituted for thymidine.

[0070] The term “allelic variant” refers to one of two or more alternative naturally occurring forms of a gene, wherein each gene possesses a unique nucleotide sequence. In a preferred embodiment, different alleles of a given gene have similar or identical biological properties.

[0071] The term “percent sequence identity” in the context of nucleic acid sequences refers to the residues in two sequences which are the same when aligned for maximum correspondence. The length of sequence identity comparison may be over a stretch of at least about nine nucleotides, usually at least about 20 nucleotides, more usually at least about 24 nucleotides, typically at least about 28 nucleotides, more typically at least about 32 nucleotides, and preferably at least about 36 or more nucleotides. There are a number of different algorithms known in the art which can be used to measure nucleotide sequence identity. For instance, polynucleotide sequences can be compared using FASTA, Gap or Bestfit, which are programs in Wisconsin Package Version 10.0, Genetics Computer Group (GCG), Madison, Wis. FASTA, which includes, e.g., the programs FASTA2 and FASTA3, provides alignments and percent sequence identity of the regions of the best overlap between the query and search sequences (Pearson, Methods Enzymol. 183: 63-98 (1990); Pearson, Methods Mol. Biol. 132: 185-219 (2000); Pearson, Methods Enzymol. 266: 227-258 (1996); Pearson, J. Mol. Biol. 276: 71-84 (1998)). Unless otherwise specified, default parameters for a particular program or algorithm are used. For instance, percent sequence identity between nucleic acid sequences can be determined using FASTA with its default parameters (a word size of 6 and the NOPAM factor for the scoring matrix) or using Gap with its default parameters as provided in GCG Version 6.1.

[0072] A reference to a nucleic acid sequence encompasses its complement unless otherwise specified. Thus, a reference to a nucleic acid molecule having a particular sequence should be understood to encompass its complementary strand, with its complementary sequence. The complementary strand is also useful, e.g., for antisense therapy, double stranded RNA (dsRNA) inhibition (RNAi), combination of triplex and antisense, hybridization probes and PCR primers.

[0073] In the molecular biology art, researchers use the terms “percent sequence identity”, “percent sequence similarity” and “percent sequence homology” interchangeably. In this application, these terms shall have the same meaning with respect to nucleic acid sequences only.

[0074] The term “substantial similarity” or “substantial sequence similarity,” when referring to a nucleic acid or fragment thereof, indicates that, when optimally aligned with appropriate nucleotide insertions or deletions with another nucleic acid (or its complementary strand), there is nucleotide sequence identity in at least about 50%, more preferably 60% of the nucleotide bases, usually at least about 70%, more usually at least about 80%, preferably at least about 90%, more preferably at least about 95-99%, and most preferably at least about 99.5-99.9% of the nucleotide bases, as measured by any well known algorithm of sequence identity, such as FASTA, BLAST or Gap, as discussed above.

[0075] Alternatively, substantial similarity exists between a first and second nucleic acid sequence when the first nucleic acid sequence or fragment thereof hybridizes to an antisense strand of the second nucleic acid, under selective hybridization conditions. Typically, selective hybridization will occur between the first nucleic acid sequence and an antisense strand of the second nucleic acid sequence when there is at least about 55% sequence identity between the first and second nucleic acid sequences—preferably at least about 65%, more preferably at least about 75%, more preferably at least about 90%, even more preferably at least about 95%, further preferably at least about 98%, and most preferably at least about 99%, 99.5%, 99.8% or 99.9%—over a stretch of at least about 14 nucleotides, more preferably at least 17 nucleotides, even more preferably at least 20, 25, 30, 35, 40, 50, 60, 70, 80, 90 or 100 nucleotides, and most preferably at least 200, 300, 400, or 500 to 1000 or greater nucleotides.

[0076] Alternatively, substantial similarity exists between a first and second nucleic acid sequence when the second nucleic acid sequence or fragment thereof hybridizes to an antisense strand of the first nucleic acid. Preferably, there is at least about 70% sequence identity between the first and second nucleic acid sequences-more preferably at least about 80%, more preferably at least about 90%, even more preferably at least about 95%, further preferably at least about 98%, and most preferably at least about 99%, 99.5%, 99.8% or 99.9% sequence identity—over the entire length of the second nucleic acid.

[0077] Nucleic acid hybridization will be affected by such conditions as salt concentration, temperature, solvents, the base composition of the hybridizing species, length of the complementary regions, and the number of nucleotide base mismatches between the hybridizing nucleic acids, as will be readily appreciated by those skilled in the art. “Stringent hybridization conditions” and “stringent wash conditions” in the context of nucleic acid hybridization experiments depend upon a number of different physical parameters. The most important parameters include temperature of hybridization, base composition of the nucleic acids, salt concentration and length of the nucleic acid. One having ordinary skill in the art knows how to vary these parameters to achieve a particular stringency of hybridization. In general, “stringent hybridization” is performed at about 25° C. below the thermal melting point (Tₘ) for the specific DNA hybrid under a particular set of conditions. “Stringent washing” is performed at temperatures about 5° C. lower than the Tₘ for the specific DNA hybrid under a particular set of conditions. The Tₘ is the temperature at which 50% of the target sequence hybridizes to a perfectly matched probe. See Sambrook (1989), supra, p. 9.51.

[0078] The Tₘ for a particular DNA-DNA hybrid can be estimated by the formula:
Tₘ=81.5° C.+16.6 (log₁₀[Na⁺])+0.41 (fraction G+C)−0.63 (% formamide)−(600/1) where I is the length of the hybrid in base pairs.

[0079] The Tₘ for a particular RNA-RNA hybrid can be estimated by the formula:
Tₘ=79.8° C.+18.5 (log₁₀[Na⁺])+0.58 (fraction G+C)+11.8 (fraction G+C)²−0.35 (% formamide)−(820/1).

[0080] The Tₘ for a particular RNA-DNA hybrid can be estimated by the formula:
Tₘ=79.8° C.+18.5(log₁₀[Na⁺])+0.58 (fraction G+C)+11.8 (fraction G+C)²−0.50 (% formamide)−(820/1).

[0081] In general, the Tₘ decreases by 1-1.5° C. for each 1% of mismatch between two nucleic acid sequences. Thus, one having ordinary skill in the art can alter hybridization and/or washing conditions to obtain sequences that have higher or lower degrees of sequence identity to the target nucleic acid. For instance, to obtain hybridizing nucleic acids that contain up to 10% mismatch from the target nucleic acid sequence, 10-15° C. would be subtracted from the calculated Tₘ of a perfectly matched hybrid, and then the hybridization and washing temperatures adjusted accordingly. Probe sequences may also hybridize specifically to duplex DNA under certain conditions to form triplex or other higher order DNA complexes. The preparation of such probes and suitable hybridization conditions are well known in the art.

[0082] An example of stringent hybridization conditions for hybridization of complementary nucleic acid sequences having more than 100 complementary residues on a filter in a Southern or Northern blot or for screening a library is 50% formamide/6×SSC at 42° C. for at least ten hours and preferably overnight (approximately 16 hours). Another example of stringent hybridization conditions is 6×SSC at 68° C. without formamide for at least ten hours and preferably overnight. An example of moderate stringency hybridization conditions is 6×SSC at 55° C. without formamide for at least ten hours and preferably overnight. An example of low stringency hybridization conditions for hybridization of complementary nucleic acid sequences having more than 100 complementary residues on a filter in a Southern or northern blot or for screening a library is 6×SSC at 42° C. for at least ten hours. Hybridization conditions to identify nucleic acid sequences that are similar but not identical can be identified by experimentally changing the hybridization temperature from 68° C. to 42° C. while keeping the salt concentration constant (6×SSC), or keeping the hybridization temperature and salt concentration constant (e.g. 42° C. and 6×SSC) and varying the formamide concentration from 50% to 0%. Hybridization buffers may also include blocking agents to lower background. These agents are well known in the art. See Sambrook et al. (1989), supra, pages 8.46 and 9.46-9.58. See also Ausubel (1992), supra, Ausubel (1999), supra, and Sambrook (2001), supra.

[0083] Wash conditions also can be altered to change stringency conditions. An example of stringent wash conditions is a 0.2×SSC wash at 65° C. for 15 minutes (see Sambrook (1989), supra, for SSC buffer). Often the high stringency wash is preceded by a low stringency wash to remove excess probe. An exemplary medium stringency wash for duplex DNA of more than 100 base pairs is 1×SSC at 45° C. for 15 minutes. An exemplary low stringency wash for such a duplex is 4×SSC at 40° C. for 15 minutes. In general, signal-to-noise ratio of 2× or higher than that observed for an unrelated probe in the particular hybridization assay indicates detection of a specific hybridization.

[0084] As defined herein, nucleic acids that do not hybridize to each other under stringent conditions are still substantially similar to one another if they encode polypeptides that are substantially identical to each other. This occurs, for example, when a nucleic acid is created synthetically or recombinantly using a high codon degeneracy as permitted by the redundancy of the genetic code.

[0085] Hybridization conditions for nucleic acid molecules that are shorter than 100 nucleotides in length (e.g., for oligonucleotide probes) may be calculated by the formula:
Tₘ=81.5° C.+16.6(log₁₀[Na⁺])+0.41(fraction G+C)−(600/N),
wherein N is change length and the [Na⁺] is 1 M or less. See Sambrook (1989), supra, p. 11.46. For hybridization of probes shorter than 100 nucleotides, hybridization is usually performed under stringent conditions (5-10° C. below the Tₘ) using high concentrations (0.1-1.0 pmol/ml) of probe. Id. at p. 11.45. Determination of hybridization using mismatched probes, pools of degenerate probes or “guessmers,” as well as hybridization solutions and methods for empirically determining hybridization conditions are well known in the art. See, e.g., Ausubel (1999), supra; Sambrook (1989), supra, pp. 11.45-11.57.

[0086] The term “digestion” or “digestion of DNA” refers to catalytic cleavage of the DNA with a restriction enzyme that acts only at certain sequences in the DNA. The various restriction enzymes referred to herein are commercially available and their reaction conditions, cofactors and other requirements for use are known and routine to the skilled artisan. For analytical purposes, typically, 1 μg of plasmid or DNA fragment is digested with about 2 units of enzyme in about 20 μl of reaction buffer. For the purpose of isolating DNA fragments for plasmid construction, typically 5 to 50 μg of DNA are digested with 20 to 250 units of enzyme in proportionately larger volumes. Appropriate buffers and substrate amounts for particular restriction enzymes are described in standard laboratory manuals, such as those referenced below, and are specified by commercial suppliers. Incubation times of about I hour at 37° C. are ordinarily used, but conditions may vary in accordance with standard procedures, the supplier's instructions and the particulars of the reaction. After digestion, reactions may be analyzed, and fragments may be purified by electrophoresis through an agarose or polyacrylamide gel, using well known methods that are routine for those skilled in the art.

[0087] The term “ligation” refers to the process of forming phosphodiester bonds between two or more polynucleotides, which most often are double-stranded DNAs. Techniques for ligation are well known to the art and protocols for ligation are described in standard laboratory manuals and references, such as, e.g., Sambrook (1989), supra.

[0088] Genome-derived “single exon probes,” are probes that comprise at least part of an exon (“reference exon”) and can hybridize detectably under high stringency conditions to transcript-derived nucleic acids that include the reference exon but do not hybridize detectably under high stringency conditions to nucleic acids that lack the reference exon. Single exon probes typically further comprise, contiguous to a first end of the exon portion, a first intronic and/or intergenic sequence that is identically contiguous to the exon in the genome, and may contain a second intronic and/or intergenic sequence that is identically contiguous to the exon in the genome. The minimum length of genome-derived single exon probes is defined by the requirement that the exonic portion be of sufficient length to hybridize under high stringency conditions to transcript-derived nucleic acids, as discussed above. The maximum length of genome-derived single exon probes is defined by the requirement that the probes contain portions of no more than one exon. The single exon probes may contain priming sequences not found in contiguity with the rest of the probe sequence in the genome, which priming sequences are useful for PCR and other amplification-based technologies. In another aspect, the invention is directed to single exon probes based on the OSNAs disclosed herein.

[0089] In one embodiment, the term “microarray” refers to a “nucleic acid microarray” having a substrate-bound plurality of nucleic acids, hybridization to each of the plurality of bound nucleic acids being separately detectable. The substrate can be solid or porous, planar or non-planar, unitary or distributed. Nucleic acid microarrays include all the devices so called in Schena (ed.), DNA Microarrays: A Practical Approach (Practical Approach Series), Oxford University Press (1999); Nature Genet. 21(1)(suppl.):1-60 (1999); Schena (ed.), Microarray Biochip: Tools and Technology, Eaton Publishing Company/BioTechniques Books Division (2000). Additionally, these nucleic acid microarrays include substrate-bound plurality of nucleic acids in which the plurality of nucleic acids are disposed on a plurality of beads, rather than on a unitary planar substrate, as is described, inter alia, in Brenner et al., Proc. Natl. Acad. Sci. USA 97(4):1665-1670 (2000). Examples of nucleic acid microarrays may be found in U.S. Pat. Nos. 6,391,623, 6,383,754, 6,383,749, 6,380,377, 6,379,897, 6,376,191, 6,372,431, 6,351,712 6,344,316, 6,316,193, 6,312,906, 6,309,828, 6,309,824, 6,306,643, 6,300,063, 6,287,850, 6,284,497, 6,284,465, 6,280,954, 6,262,216, 6,251,601, 6,245,518, 6,263,287, 6,251,601, 6,238,866, 6,228,575, 6,214,587, 6,203,989, 6,171,797, 6,103,474, 6,083,726, 6,054,274, 6,040,138, 6,083,726, 6,004,755, 6,001,309, 5,958,342, 5,952,180, 5,936,731, 5,843,655, 5,814,454, 5,837,196, 5,436,327, 5,412,087, 5,405,783, the disclosures of which are incorporated herein by reference in their entireties.

[0090] In an alternative embodiment, a “microarray” may also refer to a “peptide microarray” or “protein microarray” having a substrate-bound collection of plurality of polypeptides, the binding to each of the plurality of bound polypeptides being separately detectable. Alternatively, the peptide microarray ,may have a plurality of binders, including but not limited to monoclonal antibodies, polyclonal antibodies, phage display binders, yeast 2 hybrid binders, aptamers, which can specifically detect the binding of the polypeptides of this invention. The array may be based on autoantibody detection to the polypeptides of this invention, see Robinson et al., Nature Medicine 8(3):295-301 (2002). Examples of peptide arrays may be found in WO 02/31463, WO 02/25288, WO 01/94946, WO 01/88162, WO 01/68671, WO 01/57259, WO 00/61806, WO 00/54046, WO 00/47774, WO 99/40434, WO 99/39210, WO 97/42507 and U.S. Pat. Nos. 6,268,210, 5,766,960, 5,143,854, the disclosures of which are incorporated herein by reference in their entireties.

[0091] In addition, determination of the levels of the OSNA or OSP may be made in a multiplex manner using techniques described in WO 02/29109, WO 02/24959, WO 01/83502, WO01/73113, WO 01/59432, WO 01/57269, WO 99/67641, the disclosures of which are incorporated herein by reference in their entireties.

[0092] The term “mutant”, “mutated”, or “mutation” when applied to nucleic acid sequences means that nucleotides in a nucleic acid sequence may be inserted, deleted or changed compared to a reference nucleic acid sequence. A single alteration may be made at a locus (a point mutation) or multiple nucleotides may be inserted, deleted or changed at a single locus. In addition, one or more alterations may be made at any number of loci within a nucleic acid sequence. In a preferred embodiment of the present invention, the nucleic acid sequence is the wild type nucleic acid sequence encoding a OSP or is a OSNA. The nucleic acid sequence may be mutated by any method known in the art including those mutagenesis techniques described infra.

[0093] The term “error-prone PCR” refers to a process for performing PCR under conditions where the copying fidelity of the DNA polymerase is low, such that a high rate of point mutations is obtained along the entire length of the PCR product. See, e.g., Leung et al., Technique 1: 11 -15 (1989) and Caldwell et al., PCR Methods Applic. 2: 28-33 (1992).

[0094] The term “oligonucleotide-directed mutagenesis” refers to a process which enables the generation of site-specific mutations in any cloned DNA segment of interest. See, e.g., Reidhaar-Olson et al., Science 241: 53-57 (1988).

[0095] The term “assembly PCR” refers to a process which involves the assembly of a PCR product from a mixture of small DNA fragments. A large number of different PCR reactions occur in parallel in the same vial, with the products of one reaction priming the products of another reaction.

[0096] The term “sexual PCR mutagenesis” or “DNA shuffling” refers to a method of error-prone PCR coupled with forced homologous recombination between DNA molecules of different but highly related DNA sequence in vitro, caused by random fragmentation of the DNA molecule based on sequence similarity, followed by fixation of the crossover by primer extension in an error-prone PCR reaction. See, e.g., Stemmer, Proc. Natl. Acad. Sci. US.A. 91: 10747-10751 (1994). DNA shuffling can be carried out between several related genes (“Family shuffling”).

[0097] The term “in vivo mutagenesis” refers to a process of generating random mutations in any cloned DNA of interest which involves the propagation of the DNA in a strain of bacteria such as E. coli that carries mutations in one or more of the DNA repair pathways. These “mutator” strains have a higher random mutation rate than that of a wild-type parent. Propagating the DNA in a mutator strain will eventually generate random mutations within the DNA.

[0098] The term “cassette mutagenesis” refers to any process for replacing a small region of a double-stranded DNA molecule with a synthetic oligonucleotide “cassette” that differs from the native sequence. The oligonucleotide often contains completely and/or partially randomized native sequence.

[0099] The term “recursive ensemble mutagenesis” refers to an algorithm for protein engineering (protein mutagenesis) developed to produce diverse populations of phenotypically related mutants whose members differ in amino acid sequence. This method uses a feedback mechanism to control successive rounds of combinatorial cassette mutagenesis. See, e.g., Arkin et al., Proc. Natl. Acad. Sci. U.S.A. 89: 7811-7815 (1992).

[0100] The term “exponential ensemble mutagenesis” refers to a process for generating combinatorial libraries with a high percentage of unique and functional mutants, wherein small groups of residues are randomized in parallel to identify, at each altered position, amino acids which lead to functional proteins. See, e.g., Delegrave et al., Biotechnology Research 11: 1548-1552 (1993); Arnold, Current Opinion in Biotechnology 4: 450-455 (1993).

[0101] “Operatively linked” expression control sequences refers to a linkage in which the expression control sequence is either contiguous with the gene of interest to control the gene of interest, or acts in trans or at a distance to control the gene of interest.

[0102] The term “expression control sequence” as used herein refers to polynucleotide sequences which are necessary to affect the expression of coding sequences to which they are operatively linked. Expression control sequences are sequences which control the transcription, post-transcriptional events and translation of nucleic acid sequences. Expression control sequences include appropriate transcription initiation, termination, promoter and enhancer sequences; efficient RNA processing signals such as splicing and polyadenylation signals; sequences that stabilize cytoplasmic mRNA; sequences that enhance translation efficiency (e.g., ribosome binding sites); sequences that enhance protein stability; and when desired, sequences that enhance protein secretion. The nature of such control sequences differs depending upon the host organism; in prokaryotes, such control sequences generally include promoter, ribosomal binding site, and transcription termination sequence. The term “control sequences” is intended to include, at a minimum, all components whose presence is essential for expression, and can also include additional components whose presence is advantageous, for example, leader sequences and fusion partner sequences.

[0103] The term “vector,” as used herein, is intended to refer to a nucleic acid molecule capable of transporting another nucleic acid to which it has been linked. One type of vector is a “plasmid”, which refers to a circular double stranded DNA loop into which additional DNA segments may be ligated. Other vectors include cosmids, bacterial artificial chromosomes (BAC) and yeast artificial chromosomes (YAC). Another type of vector is a viral vector, wherein additional DNA segments may be ligated into the viral genome. Viral vectors that infect bacterial cells are referred to as bacteriophages. Certain vectors are capable of autonomous replication in a host cell into which they are introduced (e.g., bacterial vectors having a bacterial origin of replication). Other vectors can be integrated into the genome of a host cell upon introduction into the host cell, and thereby are replicated along with the host genome. Moreover, certain vectors are capable of directing the expression of genes to which they are operatively linked. Such vectors are referred to herein as “recombinant expression vectors” (or simply, “expression vectors”). In general, expression vectors of utility in recombinant DNA techniques are often in the form of plasmids. In the present specification, “plasmid” and “vector” may be used interchangeably as the plasmid is the most commonly used form of vector. However, the invention is intended to include other forms of expression vectors that serve equivalent functions.

[0104] The term “recombinant host cell” (or simply “host cell”), as used herein, is intended to refer to a cell into which a recombinant expression vector has been introduced. It should be understood that such terms are intended to refer not only to the particular subject cell but to the progeny of such a cell. Because certain modifications may occur in succeeding generations due to either mutation or environmental influences, such progeny may not, in fact, be identical to the parent cell, but are still included within the scope of the term “host cell” as used herein.

[0105] As used herein, the phrase “open reading frame” and the equivalent acronym “ORF” refers to that portion of a transcript-derived nucleic acid that can be translated in its entirety into a sequence of contiguous amino acids. As so defined, an ORF has length, measured in nucleotides, exactly divisible by 3. As so defined, an ORF need not encode the entirety of a natural protein.

[0106] As used herein, the phrase “ORF-encoded peptide” refers to the predicted or actual translation of an ORF.

[0107] As used herein, the phrase “degenerate variant” of a reference nucleic acid sequence is meant to be inclusive of all nucleic acid sequences that can be directly translated, using the standard genetic code, to provide an amino acid sequence identical to that translated from the reference nucleic acid sequence.

[0108] The term “polypeptide” encompasses both naturally occurring and non-naturally occurring proteins and polypeptides, as well as polypeptide fragments and polypeptide mutants, derivatives and analogs thereof. A polypeptide may be monomeric or polymeric. Further, a polypeptide may comprise a number of different modules within a single polypeptide each of which has one or more distinct activities. A preferred polypeptide in accordance with the invention comprises a OSP encoded by a nucleic acid molecule of the instant invention, or a fragment, mutant, analog and derivative thereof.

[0109] The term “isolated protein” or “isolated polypeptide” is a protein or polypeptide that by virtue of its origin or source of derivation (1) is not associated with naturally associated components that accompany it in its native state, (2) is free of other proteins from the same species (3) is expressed by a cell from a different species, or (4) does not occur in nature. Thus, a polypeptide that is chemically synthesized or synthesized in a cellular system different from the cell from which it naturally originates will be “isolated” from its naturally associated components. A polypeptide or protein may also be rendered substantially free of naturally associated components by isolation, using protein purification techniques well known in the art.

[0110] A protein or polypeptide is “substantially pure,” “substantially homogeneous” or “substantially purified” when at least about 60% to 75% of a sample exhibits a single species of polypeptide. The polypeptide or protein may be monomeric or multimeric. A substantially pure polypeptide or protein will typically comprise about 50%, 60%, 70%, 80% or 90% W/W of a protein sample, more usually about 95%, and preferably will be over 99% pure. Protein purity or homogeneity may be determined by a number of means well known in the art, such as polyacrylamide gel electrophoresis of a protein sample, followed by visualizing a single polypeptide band upon staining the gel with a stain well known in the art. For certain purposes, higher resolution may be provided by using HPLC or other means well known in the art for purification.

[0111] The term “fragment” when used herein with respect to polypeptides of the present invention refers to a polypeptide that has an amino-terminal and/or carboxy-terminal deletion compared to a full-length OSP. In a preferred embodiment, the fragment is a contiguous sequence in which the amino acid sequence of the fragment is identical to the corresponding positions in the naturally occurring polypeptide. Fragments typically are at least 5, 6, 7, 8, 9 or 10 amino acids long, preferably at least 12, 14, 16 or 18 amino acids long, more preferably at least 20 amino acids long, more preferably at least 25, 30, 35, 40 or 45, amino acids, even more preferably at least 50 or 60 amino acids long, and even more preferably at least 70 amino acids long.

[0112] A “derivative” when used herein with respect to polypeptides of the present invention refers to a polypeptide which is substantially similar in primary structural sequence to a OSP but which include, e.g., in vivo or in vitro chemical and biochemical modifications that are not found in the OSP. Such modifications include, for example, acetylation, acylation, ADP-ribosylation, amidation, covalent attachment of flavin, covalent attachment of a heme moiety, covalent attachment of a nucleotide or nucleotide derivative, covalent attachment of a lipid or lipid derivative, covalent attachment of phosphotidylinositol, cross-linking, cyclization, disulfide bond formation, demethylation, formation of covalent cross-links, formation of cystine, formation of pyroglutamate, formylation, gamma-carboxylation, glycosylation, GPI anchor formation, hydroxylation, iodination, methylation, myristoylation, oxidation, proteolytic processing, phosphorylation, prenylation, racemization, selenoylation, sulfation, transfer-RNA mediated addition of amino acids to proteins such as arginylation, and ubiquitination. Other modification include, e.g., labeling with radionuclides, and various enzymatic modifications, as will be readily appreciated by those skilled in the art. A variety of methods for labeling polypeptides and of substituents or labels useful for such purposes are well known in the art, and include radioactive isotopes such as ¹²⁵I, ³²P, ³⁵S, ¹⁴C and ³H, ligands which bind to labeled antiligands (e.g., antibodies), fluorophores, chemiluminescent agents, enzymes, and antiligands which can serve as specific binding pair members for a labeled ligand. The choice of label depends on the sensitivity required, ease of conjugation with the primer, stability requirements, and available instrumentation. Methods for labeling polypeptides are well known in the art. See Ausubel (1992), supra; Ausubel (1999), supra.

[0113] The term “fusion protein” refers to polypeptides of the present invention coupled to a heterologous amino acid sequences. Fusion proteins are useful because they can be constructed to contain two or more desired functional elements from two or more different proteins. A fusion protein comprises at least 10 contiguous amino acids from a polypeptide of interest, more preferably at least 20 or 30 amino acids, even more preferably at least 40, 50 or 60 amino acids, yet more preferably at least 75, 100 or 125 amino acids. Fusion proteins can be produced recombinantly by constructing a nucleic acid sequence that encodes the polypeptide or a fragment thereof in frame with a nucleic acid sequence encoding a different protein or peptide and then expressing the fusion protein. Alternatively, a fusion protein can be produced chemically by crosslinking the polypeptide or a fragment thereof to another protein.

[0114] The term “analog” refers to both polypeptide analogs and non-peptide analogs. The term “polypeptide analog” as used herein refers to a polypeptide that is comprised of a segment of at least 25 amino acids that has substantial identity to a portion of an amino acid sequence but which contains non-natural amino acids or non-natural inter-residue bonds. In a preferred embodiment, the analog has the same or similar biological activity as the native polypeptide. Typically, polypeptide analogs comprise a conservative amino acid substitution (or insertion or deletion) with respect to the naturally occurring sequence. Analogs typically are at least 20 amino acids long, preferably at least 50 amino acids long or longer, and can often be as long as a full-length naturally occurring polypeptide.

[0115] The term “non-peptide analog” refers to a compound with properties that are analogous to those of a reference polypeptide. A non-peptide compound may also be termed a “peptide mimetic” or a “peptidomimetic.” Such compounds are often developed with the aid of computerized molecular modeling. Peptide mimetics that are structurally similar to useful peptides may be used to produce an equivalent effect. Generally, peptidomimetics are structurally similar to a paradigm polypeptide (i.e., a polypeptide that has a desired biochemical property or pharmacological activity), but have one or more peptide linkages optionally replaced by a linkage selected from the group consisting of: —CH₂NH—, —CH₂S—, —CH₂—CH₂—, —CH═CH— (cis and trans), —COCH₂—, —CH(OH)CH₂—, and —CH₂SO—, by methods well known in the art. Systematic substitution of one or more amino acids of a consensus sequence with a D-amino acid of the same type (e.g., D-lysine in place of L-lysine) may also be used to generate more stable peptides. In addition, constrained peptides comprising a consensus sequence or a substantially identical consensus sequence variation may be generated by methods known in the art (Rizo et al., Ann. Rev. Biochem. 61:387-418 (1992)). For example, one may add internal cysteine residues capable of forming intramolecular disulfide bridges which cyclize the peptide.

[0116] The term “mutant” or “mutein” when referring to a polypeptide of the present invention relates to an amino acid sequence containing substitutions, insertions or deletions of one or more amino acids compared to the amino acid sequence of a OSP. A mutein may have one or more amino acid point substitutions, in which a single amino acid at a position has been changed to another amino acid, one or more insertions and/or deletions, in which one or more amino acids are inserted or deleted, respectively, in the sequence of the naturally occurring protein, and/or truncations of the amino acid sequence at either or both the amino or carboxy termini. Further, a mutein may have the same or different biological activity as the naturally occurring protein. For instance, a mutein may have an increased or decreased biological activity. A mutein has at least 50% sequence similarity to the wild type protein, preferred is 60% sequence similarity, more preferred is 70% sequence similarity. Even more preferred are muteins having 80%, 85% or 90% sequence similarity to a OSP. In an even more preferred embodiment, a mutein exhibits 95% sequence identity, even more preferably 97%, even more preferably 98% and even more preferably 99%. Sequence similarity may be measured by any common sequence analysis algorithm, such as GAP or BESTFIT or other variation Smith-Waterman alignment. See, T. F. Smith and M. S. Waterman, J. Mol. Biol. 147:195-197 (1981) and W. R. Pearson, Genomics 11:635-650 (1991).

[0117] Preferred amino acid substitutions are those which: (1) reduce susceptibility to proteolysis, (2) reduce susceptibility to oxidation, (3) alter binding affinity for forming protein complexes, (4) alter binding affinity or enzymatic activity, and (5) confer or modify other physicochemical or functional properties of such analogs. For example, single or multiple amino acid substitutions (preferably conservative amino acid substitutions) may be made in the naturally occurring sequence (preferably in the portion of the polypeptide outside the domain(s) forming intermolecular contacts. In a preferred embodiment, the amino acid substitutions are moderately conservative substitutions or conservative substitutions. In a more preferred embodiment, the amino acid substitutions are conservative substitutions. A conservative amino acid substitution should not substantially change the structural characteristics of the parent sequence (e.g., a replacement amino acid should not tend to disrupt a helix that occurs in the parent sequence, or disrupt other types of secondary structure that characterizes the parent sequence). Examples of art-recognized polypeptide secondary and tertiary structures are described in Creighton (ed.), Proteins, Structures and Molecular Principles, W. H. Freeman and Company (1984); Branden et al. (ed.), Introduction to Protein Structure, Garland Publishing (1991); Thornton et al., Nature 354:105-106 (1991).

[0118] As used herein, the twenty conventional amino acids and their abbreviations follow conventional usage. See Golub et al. (eds.), Immunology—A Synthesis 2nd Ed., Sinauer Associates (1991). Stereoisomers (e.g., D-amino acids) of the twenty conventional amino acids, unnatural amino acids such as α-, α-disubstituted amino acids, N-alkyl amino acids, and other unconventional amino acids may also be suitable components for polypeptides of the present invention. Examples of unconventional amino acids include: 4-hydroxyproline, γ-carboxyglutamate, ε-N,N,N-trimethyllysine, ε-N-acetyllysine, O-phosphoserine, N-acetylserine, N-formylmethionine, 3-methylhistidine, 5-hydroxylysine, s-N-methylarginine, and other similar amino acids and imino acids (e.g., 4-hydroxyproline). In the polypeptide notation used herein, the lefthand direction is the amino terminal direction and the right hand direction is the carboxγ-terminal direction, in accordance with standard usage and convention.

[0119] By “homology” or “homologous” when referring to a polypeptide of the present invention it is meant polypeptides from different organisms with a similar sequence to the encoded amino acid sequence of a OSP and a similar biological activity or function. Although two polypeptides are said to be “homologous,” this does not imply that there is necessarily an evolutionary relationship between the polypeptides. Instead, the term “homologous” is defined to mean that the two polypeptides have similar amino acid sequences and similar biological activities or functions. In a preferred embodiment, a homologous polypeptide is one that exhibits 50% sequence similarity to OSP, preferred is 60% sequence similarity, more preferred is 70% sequence similarity. Even more preferred are homologous polypeptides that exhibit 80%, 85% or 90% sequence similarity to a OSP. In a yet more preferred embodiment, a homologous polypeptide exhibits 95%, 97%, 98% or 99% sequence similarity.

[0120] When “sequence similarity” is used in reference to polypeptides, it is recognized that residue positions that are not identical often differ by conservative amino acid substitutions. In a preferred embodiment, a polypeptide that has “sequence similarity” comprises conservative or moderately conservative amino acid substitutions. A “conservative amino acid substitution” is one in which an amino acid residue is substituted by another amino acid residue having a side chain (R group) with similar chemical properties (e.g., charge or hydrophobicity). In general, a conservative amino acid substitution will not substantially change the functional properties of a protein. In cases where two or more amino acid sequences differ from each other by conservative substitutions, the percent sequence identity or degree of similarity may be adjusted upwards to correct for the conservative nature of the substitution. Means for making this adjustment are well known to those of skill in the art. See, e.g., Pearson, Methods Mol. Biol. 24: 307-31 (1994).

[0121] For instance, the following six groups each contain amino acids that are conservative substitutions for one another:
[0122] 1) Serine (S), Threonine (T);
[0123] 2) Aspartic Acid (D), Glutamic Acid (E);
[0124] 3) Asparagine (N), Glutamine (Q);
[0125] 4) Arginine (R), Lysine (K);
[0126] 5) Isoleucine (I), Leucine (L), Methionine (M), Alanine (A), Valine (V), and
[0127] 6) Phenylalanine (F), Tyrosine (Y), Tryptophan (W).

[0128] Alternatively, a conservative replacement is any change having a positive value in the PAM250 log-likelihood matrix disclosed in Gonnet et al., Science 256: 1443-45 (1992). A “moderately conservative” replacement is any change having a nonnegative value in the PAM250 log-likelihood matrix.

[0129] Sequence similarity for polypeptides, which is also referred to as sequence identity, is typically measured using sequence analysis software. Protein analysis software matches similar sequences using measures of similarity assigned to various substitutions, deletions and other modifications, including conservative amino acid substitutions. For instance, GCG contains programs such as “Gap” and “Bestfit” which can be used with default parameters to determine sequence homology or sequence identity between closely related polypeptides, such as homologous polypeptides from different species of organisms or between a wild type protein and a mutein thereof. See, e.g., GCG Version 6.1. Other programs include FASTA, discussed supra.

[0130] A preferred algorithm when comparing a sequence of the invention to a database containing a large number of sequences from different organisms is the computer program BLAST, especially blastp or tblastn. See, e.g., Altschul et al., J. Mol. Biol. 215: 403-410 (1990); Altschul et al., Nucleic Acids Res. 25:3389-402 (1997). Preferred parameters for blastp are:

| | | |
|---|---|---|
| Expectation value: | 10 | (default) |
| Filter: | seg | (default) |
| Cost to open a gap: | 11 | (default) |
| Cost to extend a gap: | 1 | (default |
| Max. alignments: | 100 | (default) |
| Word size: | 11 | (default) |
| No. of descriptions: | 100 | (default) |

| | |
|---|---|
| Penalty Matrix: | BLOSUM62 |

[0131] The length of polypeptide sequences compared for homology will generally be at least about 16 amino acid residues, usually at least about 20 residues, more usually at least about 24 residues, typically at least about 28 residues, and preferably more than about 35 residues. When searching a database containing sequences from a large number of different organisms, it is preferable to compare amino acid sequences.

[0132] Algorithms other than blastp for database searching using amino acid sequences are known in the art. For instance, polypeptide sequences can be compared using FASTA, a program in GCG Version 6.1. FASTA (e.g., FASTA2 and FASTA3) provides alignments and percent sequence identity of the regions of the best overlap between the query and search sequences (Pearson (1990), supra; Pearson (2000), supra. For example, percent sequence identity between amino acid sequences can be determined using FASTA with its default or recommended parameters (a word size of 2 and the PAM250 scoring matrix), as provided in GCG Version 6.1.

[0133] An “antibody” refers to an intact immunoglobulin, or to an antigen-binding portion thereof that competes with the intact antibody for specific binding to a molecular species, e.g., a polypeptide of the instant invention. Antigen-binding portions may be produced by recombinant DNA techniques or by enzymatic or chemical cleavage of intact antibodies. Antigen-binding portions include, inter alia, Fab, Fab′, F(ab′)₂, Fv, dAb, and complementarity determining region (CDR) fragments, single-chain antibodies (scFv), chimeric antibodies, diabodies and polypeptides that contain at least a portion of an immunoglobulin that is sufficient to confer specific antigen binding to the polypeptide. A Fab fragment is a monovalent fragment consisting of the VL, VH, CL and CHI domains; a F(ab′)₂ fragment is a bivalent fragment comprising two Fab fragments linked by a disulfide bridge at the hinge region; a Fd fragment consists of the VH and CH1 domains; a Fv fragment consists of the VL and VH domains of a single arm of an antibody; and a dAb fragment consists of a VH domain. See, e.g., Ward et al., Nature 341: 544-546 (1989).

[0134] By “bind specifically” and “specific binding” as used herein it is meant the ability of the antibody to bind to a first molecular species in preference to binding to other molecular species with which the antibody and first molecular species are admixed. An antibody is said specifically to “recognize” a first molecular species when it can bind specifically to that first molecular species.

[0135] A single-chain antibody (scFv) is an antibody in which VL and VH regions are paired to form a monovalent molecule via a synthetic linker that enables them to be made as a single protein chain. See, e.g., Bird et al., Science 242: 423-426 (1988); Huston et al., Proc. Natl. Acad. Sci. USA 85: 5879-5883 (1988). Diabodies are bivalent, bispecific antibodies in which VH and VL domains are expressed on a single polypeptide chain, but using a linker that is too short to allow for pairing between the two domains on the same chain, thereby forcing the domains to pair with complementary domains of another chain and creating two antigen binding sites. See e.g., Holliger et al., Proc. Natl. Acad. Sci. USA 90: 6444-6448 (1993); Poljak et al., Structure 2: 1121-1123 (1994). One or more CDRs may be incorporated into a molecule either covalently or noncovalently to make it an immunoadhesin. An immunoadhesin may incorporate the CDR(s) as part of a larger polypeptide chain, may covalently link the CDR(s) to another polypeptide chain, or may incorporate the CDR(s) noncovalently. The CDRs permit the immunoadhesin to specifically bind to a particular antigen of interest. A chimeric antibody is an antibody that contains one or more regions from one antibody and one or more regions from one or more other antibodies.

[0136] An antibody may have one or more binding sites. If there is more than one binding site, the binding sites may be identical to one another or may be different. For instance, a naturally occurring immunoglobulin has two identical binding sites, a single-chain antibody or Fab fragment has one binding site, while a “bispecific” or “bifunctional” antibody has two different binding sites.

[0137] An “isolated antibody” is an antibody that (1) is not associated with naturally-associated components, including other naturallγ-associated antibodies, that accompany it in its native state, (2) is free of other proteins from the same species, (3) is expressed by a cell from a different species, or (4) does not occur in nature. It is known that purified proteins, including purified antibodies, may be stabilized with non-naturally-associated components. The non-naturally-associated component may be a protein, such as albumin (e.g., BSA) or a chemical such as polyethylene glycol (PEG).

[0138] A “neutralizing antibody” or “an inhibitory antibody” is an antibody that inhibits the activity of a polypeptide or blocks the binding of a polypeptide to a ligand that normally binds to it. An “activating antibody” is an antibody that increases the activity of a polypeptide.

[0139] The term “epitope” includes any protein determinant capable of specific binding to an immunoglobulin or T-cell receptor. Epitopic determinants usually consist of chemically active surface groupings of molecules such as amino acids or sugar side chains and usually have specific three-dimensional structural characteristics, as well as specific charge characteristics. An antibody is said to specifically bind an antigen when the dissociation constant is less thanl μM, preferably less than100 nM and most preferably less than 10 nM.

[0140] The term “patient” includes human and veterinary subjects.

[0141] Throughout this specification and claims, the word “comprise,” or variations such as “comprises” or “comprising,” will be understood to imply the inclusion of a stated integer or group of integers but not the exclusion of any other integer or group of integers.

[0142] The term “ovarian specific” refers to a nucleic acid molecule or polypeptide that is expressed predominantly in the ovarian as compared to other tissues in the body. In a preferred embodiment, a “ovarian specific” nucleic acid molecule or polypeptide is detected at a level that is 1.5-fold higher than any other tissue in the body. In a more preferred embodiment, the “ovarian specific” nucleic acid molecule or polypeptide is detected at a level that is 1.8-fold higher than any other tissue in the body, more preferably 2-fold higher, still more preferably at least 2.5-fold, 3-fold, 4-fold, 5-fold, 10-fold, 15-fold, 20-fold, 25-fold, 50-fold or 100-fold higher than any other tissue in the body. Nucleic acid molecule levels may be measured by nucleic acid hybridization, such as Northern blot hybridization, or quantitative PCR. Polypeptide levels may be measured by any method known to accurately quantitate protein levels, such as Western blot analysis.

Nucleic Acid Molecules Regulatory Sequences Vectors Host Cells and Recombinant Methods of Making Polypeptides

[0143] Nucleic Acid Molecules

[0144] One aspect of the invention provides isolated nucleic acid molecules that are specific to the ovarian or to ovarian cells or tissue or that are derived from such nucleic acid molecules. These isolated ovarian specific nucleic acids (OSNAs) may comprise cDNA genomic DNA, RNA, or a combination thereof, a fragment of one of these nucleic acids, or may be a non-naturally occurring nucleic acid molecule. A OSNA may be derived from an animal. In a preferred embodiment, the OSNA is derived from a human or other mammal. In a more preferred embodiment, the OSNA is derived from a human or other primate. In an even more preferred embodiment, the OSNA is derived from a human.

[0145] In a preferred embodiment, the nucleic acid molecule encodes a polypeptide that is specific to ovarian, a ovarian-specific polypeptide (OSP). In a more preferred embodiment, the nucleic acid molecule encodes a polypeptide that comprises an amino acid sequence of SEQ ID NO: 101-240. In another highly preferred embodiment, the nucleic acid molecule comprises a nucleic acid sequence of SEQ ID NO: 1-100. Nucleotide sequences of the instantly-described nucleic acid molecules were determined by assembling several DNA molecules from either public or proprietary databases. Some of the underlying DNA sequences are the result, directly or indirectly, of at least one enzymatic polymerization reaction (e.g., reverse transcription and/or polymerase chain reaction) using an automated sequencer (such as the MegaBACE™1000, Amersham Biosciences, Sunnyvale, Calif., USA).

[0146] Nucleic acid molecules of the present invention may also comprise sequences that selectively hybridizes to a nucleic acid molecule encoding a OSNA or a complement or antisense thereof. The hybridizing nucleic acid molecule may or may not encode a polypeptide or may or may not encode a OSP. However, in a preferred embodiment, the hybridizing nucleic acid molecule encodes a OSP. In a more preferred embodiment, the invention provides a nucleic acid molecule that selectively hybridizes to a nucleic acid molecule or the antisense sequence of a nucleic acid molecule that encodes a polypeptide comprising an amino acid sequence of SEQ ID NO: 101-240. In an even more preferred embodiment, the invention provides a nucleic acid molecule that selectively hybridizes to a nucleic acid molecule comprising the nucleic acid sequence of SEQ ID NO: 1-100 or the antisense sequence thereof. Preferably, the nucleic acid molecule selectively hybridizes to a nucleic acid molecule or the antisense sequence of a nucleic acid molecule encoding a OSP under low stringency conditions. More preferably, the nucleic acid molecule selectively hybridizes to a nucleic acid molecule or the antisense sequence of a nucleic acid molecule encoding a OSP under moderate stringency conditions. Most preferably, the nucleic acid molecule selectively hybridizes to a nucleic acid molecule or the antisense sequence of a nucleic acid molecule encoding a OSP under high stringency conditions. In a preferred embodiment, the nucleic acid molecule hybridizes under low, moderate or high stringency conditions to a nucleic acid molecule or the antisense sequence of a nucleic acid molecule encoding a polypeptide comprising an amino acid sequence of SEQ ID NO: 101-240. In a more preferred embodiment, the nucleic acid molecule hybridizes under low, moderate or high stringency conditions to a nucleic acid molecule or the antisense sequence of a nucleic acid molecule comprising a nucleic acid sequence selected from SEQ ID NO: 1-100.

[0147] Nucleic acid molecules of the present invention may also comprise nucleic acid sequences that exhibit substantial sequence similarity to a nucleic acid encoding a OSP or a complement of the encoding nucleic acid molecule. In this embodiment, it is preferred that the nucleic acid molecule exhibit substantial sequence similarity to a nucleic acid molecule encoding human OSP. More preferred is a nucleic acid molecule exhibiting substantial sequence similarity to a nucleic acid molecule encoding a polypeptide having an amino acid sequence of SEQ ID NO: 101-240. By substantial sequence similarity it is meant a nucleic acid molecule having at least 60% sequence identity with a nucleic acid molecule encoding a OSP, such as a polypeptide having an amino acid sequence of SEQ ID NO: 101-240, more preferably at least 70%, even more preferably at least 80% and even more preferably at least 85%. In a more preferred embodiment, the similar nucleic acid molecule is one that has at least 90% sequence identity with a nucleic acid molecule encoding a OSP, more preferably at least 95%, more preferably at least 97%, even more preferably at least 98%, and still more preferably at least 99%. Most preferred in this embodiment is a nucleic acid molecule that has at least 99.5%, 99.6%, 99.7%, 99.8% or 99.9% sequence identity with a nucleic acid molecule encoding a OSP.

[0148] The nucleic acid molecules of the present invention are also inclusive of those exhibiting substantial sequence similarity to a OSNA or its complement. In this embodiment, it is preferred that the nucleic acid molecule exhibit substantial sequence similarity to a nucleic acid molecule having a nucleic acid sequence of SEQ ID NO: 1-100. By substantial sequence similarity it is meant a nucleic acid molecule that has at least 60% sequence identity with a OSNA, such as one having a nucleic acid sequence of SEQ ID NO: 1-100, more preferably at least 70%, even more preferably at least 80% and even more preferably at least 85%. More preferred is a nucleic acid molecule that has at least 90% sequence identity with a OSNA, more preferably at least 95%, more preferably at least 97%, even more preferably at least 98%, and still more preferably at least 99%. Most preferred is a nucleic acid molecule that has at least 99.5%, 99.6%, 99.7%, 99.8% or 99.9% sequence identity with a OSNA.

[0149] Nucleic acid molecules that exhibit substantial sequence similarity are inclusive of sequences that exhibit sequence identity over their entire length to a OSNA or to a nucleic acid molecule encoding a OSP, as well as sequences that are similar over only a part of its length. In this case, the part is at least 50 nucleotides of the OSNA or the nucleic acid molecule encoding a OSP, preferably at least 100 nucleotides, more preferably at least 150 or 200 nucleotides, even more preferably at least 250 or 300 nucleotides, still more preferably at least 400 or 500 nucleotides.

[0150] The substantially similar nucleic acid molecule may be a naturally occurring one that is derived from another species, especially one derived from another primate, wherein the similar nucleic acid molecule encodes an amino acid sequence that exhibits significant sequence identity to that of SEQ ID NO: 101-240 or demonstrates significant sequence identity to the nucleotide sequence of SEQ ID NO: 1-100. The similar nucleic acid molecule may also be a naturally occurring nucleic acid molecule from a human, when the OSNA is a member of a gene family. The similar nucleic acid molecule may also be a naturally occurring nucleic acid molecule derived from a non-primate, mammalian species, including without limitation, domesticated species, e.g., dog, cat, mouse, rat, rabbit, hamster, cow, horse and pig; and wild animals, e.g., monkey, fox, lions, tigers, bears, giraffes, zebras, etc. The substantially similar nucleic acid molecule may also be a naturally occurring nucleic acid molecule derived from a non-mammalian species, such as birds or reptiles. The naturally occurring substantially similar nucleic acid molecule may be isolated directly from humans or other species. In another embodiment, the substantially similar nucleic acid molecule may be one that is experimentally produced by random mutation of a nucleic acid molecule. In another embodiment, the substantially similar nucleic acid molecule may be one that is experimentally produced by directed mutation of a OSNA. In a preferred embodiment, the substantially similar nucleic acid molecule is an OSNA.

[0151] The nucleic acid molecules of the present invention are also inclusive of allelic variants of a OSNA or a nucleic acid encoding a OSP. For example, single nucleotide polymorphisms (SNPs) occur frequently in eukaryotic genomes and the sequence determined from one individual of a species may differ from other allelic forms present within the population. More than 1.4 million SNPs have already identified in the human genome, International Human Genome Sequencing Consortium, Nature 409: 860-921 (2001)—Variants with small deletions and insertions of more than a single nucleotide are also found in the general population, and often do not alter the function of the protein. In addition, amino acid substitutions occur frequently among natural allelic variants, and often do not substantially change protein function.

[0152] In a preferred embodiment, the allelic variant is a variant of a gene, wherein the gene is transcribed into an mRNA that encodes a OSP. In a more preferred embodiment, the gene is transcribed into an mRNA that encodes a OSP comprising an amino acid sequence of SEQ ID NO: 101-240. In another preferred embodiment, the allelic variant is a variant of a gene, wherein the gene is transcribed into an mRNA that is a OSNA. In a more preferred embodiment, the gene is transcribed into an mRNA that comprises the nucleic acid sequence of SEQ ID NO: 1-100. Also preferred is that the allelic variant is a naturally occurring allelic variant in the species of interest, particularly human.

[0153] Nucleic acid molecules of the present invention are also inclusive of nucleic acid sequences comprising a part of a nucleic acid sequence of the instant invention. The part may or may not encode a polypeptide, and may or may not encode a polypeptide that is a OSP. In a preferred embodiment, the part encodes a OSP. In one embodiment, the nucleic acid molecule comprises a part of a OSNA. In another embodiment, the nucleic acid molecule comprises a part of a nucleic acid molecule that hybridizes or exhibits substantial sequence similarity to a OSNA. In another embodiment, the nucleic acid molecule comprises a part of a nucleic acid molecule that is an allelic variant of a OSNA. In yet another embodiment, the nucleic acid molecule comprises a part of a nucleic acid molecule that encodes a OSP. A part comprises at least 10 nucleotides, more preferably at least 15, 17, 18, 20, 25, 30, 35, 40, 50, 60, 70, 80, 90, 100, 150, 200, 250, 300, 350, 400 or 500 nucleotides. The maximum size of a nucleic acid part is one nucleotide shorter than the sequence of the nucleic acid molecule encoding the full-length protein.

[0154] Nucleic acid molecules of the present invention are also inclusive of nucleic acid sequences that encode fusion proteins, homologous proteins, polypeptide fragments, muteins and polypeptide analogs, as described infra.

[0155] Nucleic acid molecules of the present invention are also inclusive of nucleic acid sequences containing modifications of the native nucleic acid molecule. Examples of such modifications include, but are not limited to, nonnative internucleoside bonds, post-synthetic modifications or altered nucleotide analogues. One having ordinary skill in the art would recognize that the type of modification that may be made will depend upon the intended use of the nucleic acid molecule. For instance, when the nucleic acid molecule is used as a hybridization probe, the range of such modifications will be limited to those that permit sequence-discriminating base pairing of the resulting nucleic acid. When used to direct expression of RNA or protein in vitro or in vivo, the range of such modifications will be limited to those that permit the nucleic acid to function properly as a polymerization substrate. When the isolated nucleic acid is used as a therapeutic agent, the modifications will be limited to those that do not confer toxicity upon the isolated nucleic acid.

[0156] Accordingly, in one embodiment, a nucleic acid molecule may include nucleotide analogues that incorporate labels that are directly detectable, such as radiolabels or fluorophores, or nucleotide analogues that incorporate labels that can be visualized in a subsequent reaction, such as biotin or various haptens. The labeled nucleic acid molecules are particularly useful as hybridization probes.

[0157] Common radiolabeled analogues include those labeled with ³²P, ³²P, and ³⁵S, such as α-³²P-dATP, α-³²P-dCTP, α-³²P-dGTP, α-³²P-dTTP, α-³²P-3′dATP, α-³²P-ATP, α-³²P-CTP, α-³²P-GTP, α-³²P-UTP, α-³⁵S-dATP, γ-³⁵S-GTP, γ-³³β-dATP, and the like.

[0158] Commercially available fluorescent nucleotide analogues readily incorporated into the nucleic acids of the present invention include Cy3-dCTP, Cy3-dUTP, Cy5-dCTP, Cy3-dUTP (Amersham Biosciences, Piscataway, N.J., USA), fluorescein-12-dUTP, tetramethylrhodamine-6-dUTP, Texas Red®-5-dUTP, Cascade Blue®-7-dUTP, BODIPY® FL-14-dUTP, BODIPY® TMR-14-dUTP, BODIPY® TR-14-dUTP, Rhodamine Green™-5-dUTP, Oregon Green® 488-5-dUTP, Texas Red®-12-dUTP, BODIPY® 630/650-14-dUTP, BODIPY® 650/665-14-dUTP, Alexa Fluor® 488-5-dUTP, Alexa Fluor® 532-5-dUTP, Alexa Fluor® 568-5-dUTP, Alexa Fluor® 594-5-dUTP, Alexa Fluor® 546-14-dUTP, fluorescein-12-UTP, tetramethylrhodamine-6-UTP, Texas Red®-5-UTP, Cascade Blue®-7-UTP, BODIPY® FL-14-UTP, BODIPY® TMR-14-UTP, BODIPY® TR-14-UTP, Rhodamine Green™-5-UTP, Alexa Fluor® 488-5-UTP, Alexa Fluor® 546-14-UTP (Molecular Probes, Inc. Eugene, Oreg., USA). One may also custom synthesize nucleotides having other fluorophores. See Henegariu et al., Nature Biotechnol. 18: 345-348 (2000).

[0159] Haptens that are commonly conjugated to nucleotides for subsequent labeling include biotin (biotin-11-dUTP, Molecular Probes, Inc., Eugene, Oreg., USA; biotin-21-UTP, biotin-21-dUTP, Clontech Laboratories, Inc., Palo Alto, Calif., USA), digoxigenin (DIG-11-dUTP, alkali labile, DIG-11-UTP, Roche Diagnostics Corp., Indianapolis, Ind., USA), and dinitrophenyl (dinitrophenyl-11-dUTP, Molecular Probes, Inc., Eugene, Oreg., USA).

[0160] Nucleic acid molecules of the present invention can be labeled by incorporation of labeled nucleotide analogues into the nucleic acid. Such analogues can be incorporated by enzymatic polymerization, such as by nick translation, random priming, polymerase chain reaction (PCR), terminal transferase tailing, and end-filling of overhangs, for DNA molecules, and in vitro transcription driven, e.g., from phage promoters, such as T7, T3, and SP6, for RNA molecules. Commercial kits are readily available for each such labeling approach. Analogues can also be incorporated during automated solid phase chemical synthesis. Labels can also be incorporated after nucleic acid synthesis, with the 5′ phosphate and 3′ hydroxyl providing convenient sites for post-synthetic covalent attachment of detectable labels.

[0161] Other post-synthetic approaches also permit internal labeling of nucleic acids. For example, fluorophores can be attached using a cisplatin reagent that reacts with the N7 of guanine residues (and, to a lesser extent, adenine bases) in DNA, RNA, and Peptide Nucleic Acids (PNA) to provide a stable coordination complex between the nucleic acid and fluorophore label (Universal Linkage System) (available from Molecular Probes, Inc., Eugene, Oreg., USA and Amersham Pharmacia Biotech, Piscataway, N.J., USA); see Alers et al., Genes, Chromosomes & Cancer 25: 301-305 (1999); Jelsma et al., J. NIH Res. 5: 82 (1994); Van Belkum et al., BioTechniques 16: 148-153 (1994). Alternatively, nucleic acids can be labeled using a disulfide-containing linker (FastTag™ Reagent, Vector Laboratories, Inc., Burlingame, Calif., USA) that is photo- or thermally coupled to the target nucleic acid using aryl azide chemistry; after reduction, a free thiol is available for coupling to a hapten, fluorophore, sugar, affinity ligand, or other marker.

[0162] One or more independent or interacting labels can be incorporated into the nucleic acid molecules of the present invention. For example, both a fluorophore and a moiety that in proximity thereto acts to quench fluorescence can be included to report specific hybridization through release of fluorescence quenching or to report exonucleotidic excision. See, e.g., Tyagi et al., Nature Biotechnol. 14: 303-308 (1996); Tyagi et al., Nature Biotechnol. 16: 49-53 (1998); Sokol et al., Proc. Natl. Acad. Sci. USA 95: 11538-11543 (1998); Kostrikis et al., Science 279: 1228-1229 (1998); Marras et al., Genet. Anal. 14: 151-156 (1999); Holland et al., Proc. Natl. Acad. Sci. USA 88: 7276-7280 (1991); Heid et al., Genome Res. 6(10): 986-94 (1996); Kuimelis et al., Nucleic Acids Symp. Ser. (37): 255-6 (1997); and U.S. Pat. Nos. 5,846,726, 5,925,517, 5,925,517, 5,723,591 and 5,538,848, the disclosures of which are incorporated herein by reference in their entireties.

[0163] Nucleic acid molecules of the present invention may also be modified by altering one or more native phosphodiester internucleoside bonds to more nuclease-resistant, internucleoside bonds. See Hartmann et al. (eds.), Manual of Antisense Methodology: Perspectives in Antisense Science, Kluwer Law International (1999); Stein et al. (eds.), Applied Antisense Oligonucleotide Technology, Wiley-Liss (1998); Chadwick et al. (eds.), Oligonucleotides as Therapeutic Agents—Symposium No. 209, John Wiley & Son Ltd (1997). Such altered internucleoside bonds are often desired for techniques or for targeted gene correction, Gamper et al., Nucl. Acids Res. 28(21): 4332-4339 (2000). For double stranded RNA inhibition which may utilize either natural ds RNA or ds RNA modified in its, sugar, phosphate or base, see Hannon, Nature 418(11): 244-251 (2002); Fire et al. in WO 99/32619; Tuschl et al. in US2002/0086356; Kruetzer et al. in WO 00/44895, the disclosures of which are incorporated herein by reference in their entirety;. For circular antisense, see Kool in U.S. Pat. No. 5,426,180, the disclosure of which is incorporated herein by reference in its entirety.

[0164] Modified oligonucleotide backbones include, without limitation, phosphorothioates, chiral phosphorothioates, phosphorodithioates, phosphotriesters, aminoalkylphosphotriesters, methyl and other alkyl phosphonates including 3′-alkylene phosphonates and chiral phosphonates, phosphinates, phosphoramidates including 3′-amino phosphoramidate and aminoalkylphosphoramidates, thionophosphoramidates, thionoalkylphosphonates, thionoalkylphosphotriesters, and boranophosphates having normal 3′-5′ linkages, 2′-5′ linked analogs of these, and those having inverted polarity wherein the adjacent pairs of nucleoside units are linked 3′-5′ to 5′-3′ or 2′-5′ to 5′-2′. Representative U.S. Patents that teach the preparation of the above phosphorus-containing linkages include, but are not limited to, U.S. Pat. Nos. 3,687,808; 4,469,863; 4,476,301; 5,023,243; 5,177,196; 5,188,897; 5,264,423; 5,276,019; 5,278,302; 5,286,717; 5,321,131; 5,399,676; 5,405,939; 5,453,496; 5,455,233; 5,466,677; 5,476,925; 5,519,126; 5,536,821; 5,541,306; 5,550,111; 5,563,253; 5,571,799; 5,587,361; and 5,625,050, the disclosures of which are incorporated herein by reference in their entireties. In a preferred embodiment, the modified intemucleoside linkages may be used for antisense techniques.

[0165] Other modified oligonucleotide backbones do not include a phosphorus atom, but have backbones that are formed by short chain alkyl or cycloalkyl internucleoside linkages, mixed heteroatom and alkyl or cycloalkyl internucleoside linkages, or one or more short chain heteroatomic or heterocyclic internucleoside linkages. These include those having morpholino linkages (formed in part from the sugar portion of a nucleoside); siloxane backbones; sulfide, sulfoxide and sulfone backbones; formacetyl and thioformacetyl backbones; methylene formacetyl and thioformacetyl backbones; alkene containing backbones; sulfamate backbones; methyleneimino and methylenehydrazino backbones; sulfonate and sulfonamide backbones; amide backbones; and others having mixed N, O, S and CH₂ component parts. Representative U.S. patents that teach the preparation of the above backbones include, but are not limited to, U.S. Pat. Nos. 5,034,506; 5,166,315; 5,185,444; 5,214,134; 5,216,141; 5,235,033; 5,264,562; 5,264,564; 5,405,938; 5,434,257; 5,466,677; 5,470,967; 5,489,677; 5,541,307; 5,561,225; 5,596,086; 5,602,240; 5,610,289; 5,602,240; 5,608,046; 5,610,289; 5,618,704; 5,623,070; 5,663,312; 5,633,360; 5,677,437 and 5,677,439; the disclosures of which are incorporated herein by reference in their entireties.

[0166] In other preferred nucleic acid molecules, both the sugar and the internucleoside linkage are replaced with novel groups, such as peptide nucleic acids (PNA). In PNA compounds, the phosphodiester backbone of the nucleic acid is replaced with an amide-containing backbone, in particular by repeating N-(2-aminoethyl) glycine units linked by amide bonds. Nucleobases are bound directly or indirectly to aza nitrogen atoms of the amide portion of the backbone, typically by methylene carbonyl linkages. PNA can be synthesized using a modified peptide synthesis protocol. PNA oligomers can be synthesized by both Fmoc and tBoc methods. Representative U.S. patents that teach the preparation of PNA compounds include, but are not limited to, U.S. Pat. Nos. 5,539,082; 5,714,331; and 5,719,262, each of which is herein incorporated by reference in its entirety. Automated PNA synthesis is readily achievable on commercial synthesizers (see, e.g., “PNA User's Guide,” Rev. 2, Feb. 1998, Perseptive Biosystems Part No. 60138, Applied Biosystems, Inc., Foster City, Calif.). PNA molecules are advantageous for a number of reasons. First, because the PNA backbone is uncharged, PNA/DNA and PNA/RNA duplexes have a higher thermal stability than is found in DNA/DNA and DNA/RNA duplexes. The Tm of a PNA/DNA or PNA/RNA duplex is generally 1° C. higher per base pair than the Tₘ of the corresponding DNA/DNA or DNA/RNA duplex (in 100 mM NaCl). Second, PNA molecules can also form stable PNA/DNA complexes at low ionic strength, under conditions in which DNA/DNA duplex formation does not occur. Third, PNA also demonstrates greater specificity in binding to complementary DNA because a PNA/DNA mismatch is more destabilizing than DNA/DNA mismatch. A single mismatch in mixed a PNA/DNA 15-mer lowers the Tm by 8-20° C. (15° C. on average). In the corresponding DNA/DNA duplexes, a single mismatch lowers the Tm by 4-16° C. (11° C. on average). Because PNA probes can be significantly shorter than DNA probes, their specificity is greater. Fourth, PNA oligomers are resistant to degradation by enzymes, and the lifetime of these compounds is extended both in vivo and in vitro because nucleases and proteases do not recognize the PNA polyamide backbone with nucleobase sidechains. See, e.g., Ray et al., FASEB J. 14(9): 1041-60 (2000); Nielsen et al., Pharmacol Toxicol. 86(1): 3-7 (2000); Larsen et al., Biochim Biophys Acta. 1489(1): 159-66 (1999); Nielsen, Curr. Opin. Struct. Biol. 9(3): 353-7 (1999), and Nielsen, Curr. Opin. Biotechnol. 10(1): 71-5 (1999).

[0167] Nucleic acid molecules may be modified compared to their native structure throughout the length of the nucleic acid molecule or can be localized to discrete portions thereof. As an example of the latter, chimeric nucleic acids can be synthesized that have discrete DNA and RNA domains and that can be used for targeted gene repair and modified PCR reactions, as further described in, Misra et al., Biochem. 37: 1917-1925 (1998); and Finn et al., Nucl. Acids Res. 24: 3357-3363 (1996), and U.S. Pat. Nos. 5,760,012 and 5,731,181, the disclosures of which are incorporated herein by reference in their entireties.

[0168] Unless otherwise specified, nucleic acid molecules of the present invention can include any topological conformation appropriate to the desired use; the term thus explicitly comprehends, among others, single-stranded, double-stranded, triplexed, quadruplexed, partially double-stranded, partially-triplexed, partially-quadruplexed, branched, hairpinned, circular, and padlocked conformations. Padlock conformations and their utilities are further described in Baner et al., Curr. Opin. Biotechnol. 12: 11-15 (2001); Escude et al., Proc. Natl. Acad. Sci. USA 14: 96(19):10603-7 (1999); and Nilsson et al., Science 265(5181): 2085-8 (1994). Triplex and quadruplex conformations, and their utilities, are reviewed in Praseuth et al., Biochim. Biophys. Acta. 1489(1): 181-206 (1999); Fox, Curr. Med. Chem. 7(1): 17-37 (2000); Kochetkova et al., Methods Mol. Biol. 130: 189-201 (2000); Chan et al., J. Mol. Med. 75(4): 267-82 (1997); Rowley et al., Mol Med 5(10): 693-700 (1999); Kool, Annu Rev Biophys Biomol Struct. 25: 1-28 (1996).

[0169] SNP Polymorphisms

[0170] Commonly, sequence differences between individuals involve differences in single nucleotide positions. SNPs may account for 90% of human DNA polymorphism. Collins et al., 8 Genome Res. 1229-31 (1998). SNPs include single base pair positions in genomic DNA at which different sequence alternatives (alleles) exist in a population. In addition, the least frequent allele generally must occur at a frequency of 1% or greater. DNA sequence variants with a reasonably high population frequency are observed approximately every 1,000 nucleotide across the genome, with estimates as high as 1 SNP per 350 base pairs. Wang et al., 280 Science 1077-82 (1998); Harding et al., 60 Am. J. Human Genet. 772-89 (1997); Taillon-Miller et al., 8 Genome Res. 748-54 (1998); Cargill et al., 22 Nat. Genet. 231-38 (1999); and Semple et al., 16 Bioinform. Disc. Note 735-38 (2000). The frequency of SNPs varies with the type and location of the change. In base substitutions, two-thirds of the substitutions involve the C-T and G-A type. This variation in frequency can be related to 5-methylcytosine deamination reactions that occur frequently, particularly at CpG dinucleotides. Regarding location, SNPs occur at a much higher frequency in non-coding regions than in coding regions. Information on over one million variable sequences is already publicly available via the Internet and more such markers are available from commercial providers of genetic information. Kwok and Gu, 5 Med. Today 538-53 (1999).

[0171] Several definitions of SNPs exist. See, e.g., Brooks, 235 Gene 177-86 (1999). As used herein, the term “single nucleotide polymorphism” or “SNP” includes all single base variants, thus including nucleotide insertions and deletions in addition to single nucleotide substitutions. There are two types of nucleotide substitutions. A transition is the replacement of one purine by another purine or one pyrimidine by another pyrimidine. A transversion is the replacement of a purine for a pyrimidine, or vice versa.

[0172] Numerous methods exist for detecting SNPs within a nucleotide sequence. A review of many of these methods can be found in Landegren et al., 8 Genome Res. 769-76 (1998). For example, a SNP in a genomic sample can be detected by preparing a Reduced Complexity Genome (RCG) from the genomic sample, then analyzing the RCG for the presence or absence of a SNP. See, e.g., WO 00/18960. Multiple SNPs in a population of target polynucleotides in parallel can be detected using, for example, the methods of WO 00/50869. Other SNP detection methods include the methods of U.S. Pat. Nos. 6,297,018 and 6,322,980. Furthermore, SNPs can be detected by restriction fragment length polymorphism (RFLP) analysis. See, e.g., U.S. Pat. Nos. 5,324,631; 5,645,995. RFLP analysis of SNPs, however, is limited to cases where the SNP either creates or destroys a restriction enzyme cleavage site. SNPs can also be detected by direct sequencing of the nucleotide sequence of interest. In addition, numerous assays based on hybridization have also been developed to detect SNPs and mismatch distinction by polymerases and ligases. Several web sites provide information about SNPs including Ensembl (ensembl with the extension org of the world wide web), Sanger Institute (sanger with the extension ac.uk/genetics/exon/ of the world wide web), National Center for Biotechnology Information (NCBI) (ncbi with the extension nlm.nih.gov/SNP/ of the world wide web), The SNP Consortium Ltd. (snp with the extension cshl.org/ of the world wide web). The chromosomal locations for the compositions disclosed herein are provided below. In addition, one of ordinary skill in the art could perform a search against the genome or any of the databases cited above using BLAST to find the chromosomal location or locations of SNPs. Another a preferred method to find the genomic coordinates and associated SNPs would be to use the BLAT tool (genome with the extension ucsc.edu of the world wide web, Kent et al. 2001, The Human Genome Browser at UCSC, Genome Research 996-1006 or Kent 2002 BLAT, The BLAST-Like Alignment Tool Genome Research, 1-9). All web sites above were accessed Dec. 3, 2003.

[0173] RNA Interference

[0174] RNA interference refers to the process of sequence-specific post transcriptional gene silencing in animals mediated by short interfering RNAs (siRNA). Fire et al., 1998, Nature, 391, 806. The corresponding process in plants is commonly referred to as post transcriptional gene silencing or RNA silencing and is also referred to as quelling in fungi. The process of post transcriptional gene silencing is thought to be an evolutionarily conserved cellular defense mechanism used to prevent the expression of foreign genes which is commonly shared by diverse flora and phyla. Fire et al., 1999, Trends Genet., 15, 358. Such protection from foreign gene expression may have evolved in response to the production of double stranded RNAs (dsRNA) derived from viral infection or the random integration of transposon elements into a host genome via a cellular response that specifically destroys homologous single stranded RNA or viral genomic RNA. The presence of dsRNA in cells triggers the RNAi response though a mechanism that has yet to be fully characterized. This mechanism appears to be different from the interferon response that results from dsRNA mediated activation of protein kinase PKR and 2′,5′-oligoadenylate synthetase resulting in non-specific cleavage of mRNA by ribonuclease L.

[0175] The presence of long dsRNAs in cells stimulates the activity of a ribonuclease III enzyme referred to as dicer. Dicer is involved in the processing of the dsRNA into short pieces of dsRNA known as short interfering RNAs (siRNA). Berstein et al., 2001, Nature, 409, 363. Short interfering RNAs derived from dicer activity are typically about 21-23 nucleotides in length and comprise about 19 base pair duplexes. Dicer has also been implicated in the excision of 21 and 22 nucleotide small temporal RNAs (stRNA) from precursor RNA of conserved structure that are implicated in translational control. Hutvagner et al., 2001, Science, 293, 834. The RNAi response also features an endonuclease complex containing a siRNA, commonly referred to as an RNA-induced silencing complex (RISC), which mediates cleavage of single stranded RNA having sequence complementary to the antisense strand of the siRNA duplex. Cleavage of the target RNA takes place in the middle of the region complementary to the antisense strand of the siRNA duplex. Elbashir et al., 2001, Genes Dev., 15, 188.

[0176] Short interfering RNA mediated RNAi has been studied in a variety of systems. Fire et al., 1998, Nature, 391, 806, were the first to observe RNAi in C. Elegans. Wianny and Goetz, 1999, Nature Cell Biol., 2, 70, describe RNAi mediated by dsRNA in mouse embryos. Hammond et al., 2000, Nature, 404, 293, describe RNAi in Drosophila cells transfected with dsRNA. Elbashir et al., 2001, Nature, 411, 494, describe RNAi induced by introduction of duplexes of synthetic 21-nucleotide RNAs in cultured mammalian cells including human embryonic kidney and HeLa cells. Recent work in Drosophila embryonic lysates (Elbashir et al., 2001, EMBO J, 20, 6877) has revealed certain requirements for siRNA length, structure, chemical composition, and sequence that are essential to mediate efficient RNAi activity. These studies have shown that 21 nucleotide siRNA duplexes are most active when containing two nucleotide 3′-overhangs. Furthermore, complete substitution of one or both siRNA strands with 2′-deoxy (2′-H) or 2′-O-methyl nucleotides abolishes RNAi activity, whereas substitution of the 3′-terminal siRNA overhang nucleotides with deoxy nucleotides (2′-H) was shown to be tolerated. Single mismatch sequences in the center of the siRNA duplex were also shown to abolish RNAi activity. In addition, these studies also indicate that the position of the cleavage site in the target RNA is defined by the 5′-end of the siRNA guide sequence rather than the 3′-end. Elbashir et al., 2001, EMBO J, 20, 6877. Other studies have indicated that a 5′-phosphate on the target-complementary strand of a siRNA duplex is required for siRNA activity and that ATP is utilized to maintain the 5′-phosphate moiety on the siRNA. Nykanen et al., 2001, Cell, 107, 309.

[0177] Studies have shown that replacing the 3′-overhanging segments of a 21-mer siRNA duplex having 2 nucleotide 3′ overhangs with deoxyribonucleotides does not have an adverse effect on RNAi activity. Replacing up to 4 nucleotides on each end of the siRNA with deoxyribonucleotides has been reported to be well tolerated whereas complete substitution with deoxyribonucleotides results in no RNAi activity. Elbashir et al., 2001, EMBO J., 20, 6877. In addition, Elbashir et al., supra, also report that substitution of siRNA with 2′-O-methyl nucleotides completely abolishes RNAi activity. Li et al., WO 00/44914, and Beach et al., WO 01/68836 both suggest that siRNA “may include modifications to either the phosphate-sugar back bone or the nucleoside to include at least one of a nitrogen or sulfur heteroatom”, however neither application teaches to what extent these modifications are tolerated in siRNA molecules nor provide any examples of such modified siRNA. Kreutzer and Limmer, Canadian Patent Application No. 2,359,180, also describe certain chemical modifications for use in dsRNA constructs in order to counteract activation of double stranded-RNA-dependent protein kinase PKR, specifically 2′-amino or 2′-O-methyl nucleotides, and nucleotides containing a 2′-O or 4′-C methylene bridge. However, Kreutzer and Limmer similarly fail to show to what extent these modifications are tolerated in siRNA molecules nor do they provide any examples of such modified siRNA.

[0178] Parrish et al., 2000, Molecular Cell, 6, 1977-1087, tested certain chemical modifications targeting the unc-22 gene in C. elegans using long (>25 nt) siRNA transcripts. The authors describe the introduction of thiophosphate residues into these siRNA transcripts by incorporating thiophosphate nucleotide analogs with T7 and T3 RNA polymerase and observed that “RNAs with two [phosphorothioate] modified bases also had substantial decreases in effectiveness as RNAi triggers; [phosphorothioate] modification of more than two residues greatly destabilized the RNAs in vitro and we were not able to assay interference activities.” Id. at 1081. The authors also tested certain modifications at the 2′-position of the nucleotide sugar in the long siRNA transcripts and observed that substituting deoxynucleotides for ribonucleotides “produced a substantial decrease in interference activity”, especially in the case of Uridine to Thymidine and/or Cytidine to deoxy-Cytidine substitutions. Id. In addition, the authors tested certain base modifications, including substituting 4-thiouracil, 5-bromouracil, 5-iodouracil, 3-(aminoallyl)uracil for uracil, and inosine for guanosine in sense and antisense strands of the siRNA, and found that whereas 4-thiouracil and 5-bromouracil were all well tolerated, inosine “produced a substantial decrease in interference activity” when incorporated in either strand. Incorporation of 5-iodouracil and 3-(aminoallyl)uracil in the antisense strand resulted in substantial decrease in RNAi activity as well.

[0179] Beach et al., WO 01/68836, describes specific methods for attenuating gene expression using endogenously derived dsRNA. Tuschl et al., WO 01/75164, describes a Drosophila in vitro RNAi system and the use of specific siRNA molecules for certain functional genomic and certain therapeutic applications; although Tuschl, 2001, Chem. Biochem., 2, 239-245, doubts that RNAi can be used to cure genetic diseases or viral infection due “to the danger of activating interferon response”. Li et al., WO 00/44914, describes the use of specific dsRNAs for use in attenuating the expression of certain target genes. Zernicka-Goetz et al., WO 01/36646, describes certain methods for inhibiting the expression of particular genes in mammalian cells using certain dsRNA molecules. Fire et al., WO 99/32619, U.S. Pat. No. 6,506,559, the contents of which are hereby incorporated by reference, describes particular methods for introducing certain dsRNA molecules into cells for use in inhibiting gene expression. Plaetinck et al., WO 00/01846, describes certain methods for identifying specific genes responsible for conferring a particular phenotype in a cell using specific dsRNA molecules. Mello et al., WO 01/29058, describes the identification of specific genes involved in dsRNA mediated RNAi. Deschamps Depaillette et al., International PCT Publication No. WO 99/07409, describes specific compositions consisting of particular dsRNA molecules combined with certain anti-viral agents. Driscoll et al., International PCT Publication No. WO 01/49844, describes specific DNA constructs for use in facilitating gene silencing in targeted organisms. Parrish et al., 2000, Molecular Cell, 6, 1977-1087, describes specific chemically modified siRNA constructs targeting the unc-22 gene of C. elegans. Tuschl et al., International PCT Publication No. WO 02/44321, describe certain synthetic siRNA constructs.

[0180] Methods for using Nucleic Acid Molecules as Probes and Primers

[0181] The isolated nucleic acid molecules of the present invention can be used as hybridization probes to detect, characterize, and quantify hybridizing nucleic acids in, and isolate hybridizing nucleic acids from, both genomic and transcript-derived nucleic acid samples. When free in solution, such probes are typically, but not invariably, detectably labeled; bound to a substrate, as in a microarray, such probes are typically, but not invariably unlabeled.

[0182] In one embodiment, the isolated nucleic acid molecules of the present invention can be used as probes to detect and characterize gross alterations in the gene of a OSNA, such as deletions, insertions, translocations, and duplications of the OSNA genomic locus through fluorescence in situ hybridization (FISH) to chromosome spreads. See, e.g., Andreeff et al. (eds.), Introduction to Fluorescence In Situ Hybridization: Principles and Clinical Applications, John Wiley & Sons (1999). The isolated nucleic acid molecules of the present invention can be used as probes to assess smaller genomic alterations using, e.g., Southern blot detection of restriction fragment length polymorphisms. The isolated nucleic acid molecules of the present invention can be used as probes to isolate genomic clones that include a nucleic acid molecule of the present invention, which thereafter can be restriction mapped and sequenced to identify deletions, insertions, translocations, and substitutions (single nucleotide polymorphisms, SNPs) at the sequence level. Alternatively, detection techniques such as molecular beacons may be used, see Kostrikis et al. Science 279:1228-1229 (1998).

[0183] The isolated nucleic acid molecules of the present invention can be also be used as probes to detect, characterize, and quantify OSNA in, and isolate OSNA from, transcript-derived nucleic acid samples. In one embodiment, the isolated nucleic acid molecules of the present invention can be used as hybridization probes to detect, characterize by length, and quantify mRNA by Northern blot of total or poly-A⁺—selected RNA samples. In another embodiment, the isolated nucleic acid molecules of the present invention can be used as hybridization probes to detect, characterize by location, and quantify mRNA by in situ hybridization to tissue sections. See, e.g., Schwarchzacher et al., In Situ Hybridization, Springer-Verlag N.Y. (2000). In another preferred embodiment, the isolated nucleic acid molecules of the present invention can be used as hybridization probes to measure the representation of clones in a cDNA library or to isolate hybridizing nucleic acid molecules acids from cDNA libraries, permitting sequence level characterization of mRNAs that hybridize to OSNAs, including, without limitations, identification of deletions, insertions, substitutions, truncations, alternatively spliced forms and single nucleotide polymorphisms. In yet another preferred embodiment, the nucleic acid molecules of the instant invention may be used in microarrays.

[0184] All of the aforementioned probe techniques are well within the skill in the art, and are described at greater length in standard texts such as Sambrook (2001), supra; Ausubel (1999), supra; and Walker et al. (eds.), The Nucleic Acids Protocols Handbook, Humana Press (2000).

[0185] In another embodiment, a nucleic acid molecule of the invention may be used as a probe or primer to identify and/or amplify a second nucleic acid molecule that selectively hybridizes to the nucleic acid molecule of the invention. In this embodiment, it is preferred that the probe or primer be derived from a nucleic acid molecule encoding a OSP. More preferably, the probe or primer is derived from a nucleic acid molecule encoding a polypeptide having an amino acid sequence of SEQ ID NO: 101-240. Also preferred are probes or primers derived from a OSNA. More preferred are probes or primers derived from a nucleic acid molecule having a nucleotide sequence of SEQ ID NO: 1-100.

[0186] In general, a probe or primer is at least 10 nucleotides in length, more preferably at least 12, more preferably at least 14 and even more preferably at least 16 or 17 nucleotides in length. In an even more preferred embodiment, the probe or primer is at least 18 nucleotides in length, even more preferably at least 20 nucleotides and even more preferably at least 22 nucleotides in length. Primers and probes may also be longer in length. For instance, a probe or primer may be 25 nucleotides in length, or may be 30, 40 or 50 nucleotides in length. Methods of performing nucleic acid hybridization using oligonucleotide probes are well known in the art. See, e.g., Sambrook et al., 1989, supra, Chapter 11 and pp. 11.31-11.32 and 11.40-11.44, which describes radiolabeling of short probes, and pp. 11.45-11.53, which describe hybridization conditions for oligonucleotide probes, including specific conditions for probe hybridization (pp. 11.50-11.51).

[0187] Methods of performing primer-directed amplification are also well known in the art. Methods for performing the polymerase chain reaction (PCR) are compiled, inter alia, in McPherson, PCR Basics: From Background to Bench, Springer Verlag (2000); Innis et al. (eds.), PCR Applications: Protocols for Functional Genomics, Academic Press (1999); Gelfand et al. (eds.), PCR Strategies, Academic Press (1998); Newton et al., PCR, Springer-Verlag N.Y. (1997); Burke (ed.), PCR: Essential Techniques, John Wiley & Son Ltd (1996); White (ed.), PCR Cloning Protocols: From Molecular Cloning to Genetic Engineering, Vol. 67, Humana Press (1996); and McPherson et al. (eds.), PCR 2: A Practical Approach, Oxford University Press, Inc. (1995). Methods for performing RT-PCR are collected, e.g., in Siebert et al. (eds.), Gene Cloning and Analysis by RT-PCR, Eaton Publishing Company/Bio Techniques Books Division, 1998; and Siebert (ed.), PCR Technique:RT-PCR, Eaton Publishing Company/BioTechniques Books (1995).

[0188] PCR and hybridization methods may be used to identify and/or isolate nucleic acid molecules of the present invention including allelic variants, homologous nucleic acid molecules and fragments. PCR and hybridization methods may also be used to identify, amplify and/or isolate nucleic acid molecules of the present invention that encode homologous proteins, analogs, fusion protein or muteins of the invention. Nucleic acid primers as described herein can be used to prime amplification of nucleic acid molecules of the invention, using transcript-derived or genomic DNA as template.

[0189] These nucleic acid primers can also be used, for example, to prime single base extension (SBE) for SNP detection (See, e.g., U.S. Pat. No. 6,004,744, the disclosure of which is incorporated herein by reference in its entirety).

[0190] Isothermal amplification approaches, such as rolling circle amplification, are also now well-described. See, e.g., Schweitzer et al., Curr. Opin. Biotechnol. 12(1): 21-7 (2001); international patent publications WO 97/19193 and WO 00/15779, and U.S. Pat. Nos. 5,854,033 and 5,714,320, the disclosures of which are incorporated herein by reference in their entireties. Rolling circle amplification can be combined with other techniques to facilitate SNP detection. See, e.g., Lizardi et al., Nature Genet. 19(3): 225-32 (1998).

[0191] Nucleic acid molecules of the present invention may be bound to a substrate either covalently or noncovalently. The substrate can be porous or solid, planar or non-planar, unitary or distributed. The bound nucleic acid molecules may be used as hybridization probes, and may be labeled or unlabeled. In a preferred embodiment, the bound nucleic acid molecules are unlabeled.

[0192] In one embodiment, the nucleic acid molecule of the present invention is bound to a porous substrate, e.g., a membrane, typically comprising nitrocellulose, nylon, or positively charged derivatized nylon. The nucleic acid molecule of the present invention can be used to detect a hybridizing nucleic acid molecule that is present within a labeled nucleic acid sample, e.g., a sample of transcript-derived nucleic acids. In another embodiment, the nucleic acid molecule is bound to a solid substrate, including, without limitation, glass, amorphous silicon, crystalline silicon or plastics. Examples of plastics include, without limitation, polymethylacrylic, polyethylene, polypropylene, polyacrylate, polymethylmethacrylate, polyvinylchloride, polytetrafluoroethylene, polystyrene, polycarbonate, polyacetal, polysulfone, celluloseacetate, cellulosenitrate, nitrocellulose, or mixtures thereof. The solid substrate may be any shape, including rectangular, disk-like and spherical. In a preferred embodiment, the solid substrate is a microscope slide or slide-shaped substrate.

[0193] The nucleic acid molecule of the present invention can be attached covalently to a surface of the support substrate or applied to a derivatized surface in a chaotropic agent that facilitates denaturation and adherence by presumed noncovalent interactions, or some combination thereof. The nucleic acid molecule of the present invention can be bound to a substrate to which a plurality of other nucleic acids are concurrently bound, hybridization to each of the plurality of bound nucleic acids being separately detectable. At low density, e.g. on a porous membrane, these substrate-bound collections are typically denominated macroarrays; at higher density, typically on a solid support, such as glass, these substrate bound collections of plural nucleic acids are colloquially termed microarrays. As used herein, the term microarray includes arrays of all densities. It is, therefore, another aspect of the invention to provide microarrays that comprise one or more of the nucleic acid molecules of the present invention.

[0194] In yet another embodiment, the invention is directed to single exon probes based on the OSNAs disclosed herein.

[0195] Expression Vectors, Host Cells and Recombinant Methods of Producing Polypeptides

[0196] Another aspect of the present invention provides vectors that comprise one or more of the isolated nucleic acid molecules of the present invention, and host cells in which such vectors have been introduced.

[0197] The vectors can be used, inter alia, for propagating the nucleic acid molecules of the present invention in host cells (cloning vectors), for shuttling the nucleic acid molecules of the present invention between host cells derived from disparate organisms (shuttle vectors), for inserting the nucleic acid molecules of the present invention into host cell chromosomes (insertion vectors), for expressing sense or antisense RNA transcripts of the nucleic acid molecules of the present invention in vitro or within a host cell, and for expressing polypeptides encoded by the nucleic acid molecules of the present invention, alone or as fusion proteins with heterologous polypeptides (expression vectors). Vectors are by now well known in the art, and are described, inter alia, in Jones et al. (eds.), Vectors: Cloning Applications: Essential Techniques (Essential Techniques Series), John Wiley & Son Ltd. (1998); Jones et al. (eds.), Vectors: Expression Systems: Essential Techniques (Essential Techniques Series), John Wiley & Son Ltd. (1998); Gacesa et al., Vectors: Essential Data, John Wiley & Sons Ltd. (1995); Cid-Arregui (eds.), Viral Vectors: Basic Science and Gene Therapy, Eaton Publishing Co. (2000); Sambrook (2001), supra; Ausubel (1999), supra. Furthermore, a variety of vectors are available commercially. Use of existing vectors and modifications thereof are well within the skill in the art. Thus, only basic features need be described here.

[0198] Nucleic acid sequences may be expressed by operatively linking them to an expression control sequence in an appropriate expression vector and employing that expression vector to transform an appropriate unicellular host. Expression control sequences are sequences that control the transcription, post-transcriptional events and translation of nucleic acid sequences. Such operative linking of a nucleic sequence of this invention to an expression control sequence, of course, includes, if not already part of the nucleic acid sequence, the provision of a translation initiation codon, ATG or GTG, in the correct reading frame upstream of the nucleic acid sequence.

[0199] A wide variety of host/expression vector combinations may be employed in expressing the nucleic acid sequences of this invention. Useful expression vectors, for example, may consist of segments of chromosomal, non-chromosomal and synthetic nucleic acid sequences.

[0200] In one embodiment, prokaryotic cells may be used with an appropriate vector. Prokaryotic host cells are often used for cloning and expression. In a preferred embodiment, prokaryotic host cells include E. coli, Pseudomonas, Bacillus and Streptomyces. In a preferred embodiment, bacterial host cells are used to express the nucleic acid molecules of the instant invention. Useful expression vectors for bacterial hosts include bacterial plasmids, such as those from E. coli, Bacillus or Streptomyces, including pBluescript, pGEX-2T, pUC vectors, col E1, pCR1, pBR322, pMB9 and their derivatives, wider host range plasmids, such as RP4, phage DNAs, e.g., the numerous derivatives of phage lambda, e.g., NM989, λGT10 and GT11, and other phages, e.g., M13 and filamentous single stranded phage DNA. Where E. coli is used as host, selectable markers are, analogously, chosen for selectivity in gram negative bacteria: e.g., typical markers confer resistance to antibiotics, such as ampicillin, tetracycline, chloramphenicol, kanamycin, streptomycin and zeocin; auxotrophic markers can also be used.

[0201] In other embodiments, eukaryotic host cells, such as yeast, insect, mammalian or plant cells, may be used. Yeast cells, typically S. cerevisiae, are useful for eukaryotic genetic studies, due to the ease of targeting genetic changes by homologous recombination and the ability to easily complement genetic defects using recombinantly expressed proteins. Yeast cells are useful for identifying interacting protein components, e.g. through use of a two-hybrid system. In a preferred embodiment, yeast cells are useful for protein expression. Vectors of the present invention for use in yeast will typically, but not invariably, contain an origin of replication suitable for use in yeast and a selectable marker that is functional in yeast. Yeast vectors include Yeast Integrating plasmids (e.g., YIp5) and Yeast Replicating plasmids (the YRp and YEp series plasmids), Yeast Centromere plasmids (the YCp series plasmids), Yeast Artificial Chromosomes (YACs) which are based on yeast linear plasmids, denoted YLp, pGPD-2, 2μ plasmids and derivatives thereof, and improved shuttle vectors such as those described in Gietz et al., Gene, 74: 527-34 (1988) (YIplac, YEplac and YCplac). Selectable markers in yeast vectors include a variety of auxotrophic markers, the most common of which are (in Saccharomyces cerevisiae) URA3, HIS3, LEU2, TRP1 and LYS2, which complement specific auxotrophic mutations, such as ura3-52, his3-D1, leu2-D1, trp1-D1 and lys2-201.

[0202] Insect cells may be chosen for high efficiency protein expression. Where the host cells are from Spodoptera frugiperda, e.g., Sf9 and Sf21 cell lines, and expresSF™ cells (Protein Sciences Corp., Meriden, Conn., USA), the vector replicative strategy is typically based upon the baculovirus life cycle. Typically, baculovirus transfer vectors are used to replace the wild-type AcMNPV polyhedrin gene with a heterologous gene of interest. Sequences that flank the polyhedrin gene in the wild-type genome are positioned 5′ and 3′ of the expression cassette on the transfer vectors. Following co-transfection with AcMNPV DNA, a homologous recombination event occurs between these sequences resulting in a recombinant virus carrying the gene of interest and the polyhedrin or p10 promoter. Selection can be based upon visual screening for lacZ fusion activity.

[0203] The host cells may also be mammalian cells, which are particularly useful for expression of proteins intended as pharmaceutical agents, and for screening of potential agonists and antagonists of a protein or a physiological pathway. Mammalian vectors intended for autonomous extrachromosomal replication will typically include a viral origin, such as the SV40 origin (for replication in cell lines expressing the large T-antigen, such as COS1 and COS7 cells), the papillomavirus origin, or the EBV origin for long term episomal replication (for use, e.g., in 293-EBNA cells, which constitutively express the EBV EBNA-1 gene product and adenovirus E1A). Vectors intended for integration, and thus replication as part of the mammalian chromosome, can, but need not, include an origin of replication functional in mammalian cells, such as the SV40 origin. Vectors based upon viruses, such as adenovirus, adeno-associated virus, vaccinia virus, and various mammalian retroviruses, will typically replicate according to the viral replicative strategy. Selectable markers for use in mammalian cells include, include but are not limited to, resistance to neomycin (G418), blasticidin, hygromycin and zeocin, and selection based upon the purine salvage pathway using HAT medium.

[0204] Expression in mammalian cells can be achieved using a variety of plasmids, including pSV2, pBC12BI, and p91023, as well as lytic virus vectors (e.g., vaccinia virus, adeno virus, and baculovirus), episomal virus vectors (e.g., bovine papillomavirus), and retroviral vectors (e.g., murine retroviruses). Useful vectors for insect cells include baculoviral vectors and pVL 941.

[0205] Plant cells can also be used for expression, with the vector replicon typically derived from a plant virus (e.g., cauliflower mosaic virus, CaMV; tobacco mosaic virus, TMV) and selectable markers chosen for suitability in plants.

[0206] It is known that codon usage of different host cells may be different. For example, a plant cell and a human cell may exhibit a difference in codon preference for encoding a particular amino acid. As a result, human mRNA may not be efficiently translated in a plant, bacteria or insect host cell. Therefore, another embodiment of this invention is directed to codon optimization. The codons of the nucleic acid molecules of the invention may be modified to resemble, as much as possible, genes naturally contained within the host cell without altering the amino acid sequence encoded by the nucleic acid molecule.

[0207] Any of a wide variety of expression control sequences may be used in these vectors to express the nucleic acid molecules of this invention. Such useful expression control sequences include the expression control sequences associated with structural genes of the foregoing expression vectors. Expression control sequences that control transcription include, e.g., promoters, enhancers and transcription termination sites. Expression control sequences in eukaryotic cells that control post-transcriptional events include splice donor and acceptor sites and sequences that modify the half-life of the transcribed RNA, e.g., sequences that direct poly(A) addition or binding sites for RNA-binding proteins. Expression control sequences that control translation include ribosome binding sites, sequences which direct targeted expression of the polypeptide to or within particular cellular compartments, and sequences in the 5′ and 3′ untranslated regions that modify the rate or efficiency of translation.

[0208] Examples of useful expression control sequences for a prokaryote, e.g., E. coli, will include a promoter, often a phage promoter, such as phage lambda pL promoter, the trc promoter, a hybrid derived from the trp and lac promoters, the bacteriophage T7 promoter (in E. coli cells engineered to express the T7 polymerase), the TAC or TRC system, the major operator and promoter regions of phage lambda, the control regions of fd coat protein, and the araBAD operon. Prokaryotic expression vectors may further include transcription terminators, such as the aspA terminator, and elements that facilitate translation, such as a consensus ribosome binding site and translation termination codon, Schomer et al., Proc. Natl. Acad. Sci. USA 83: 8506-8510 (1986).

[0209] Expression control sequences for yeast cells, typically S. cerevisiae, will include a yeast promoter, such as the CYC1 promoter, the GAL1 promoter, the GAL10 promoter, ADH1 promoter, the promoters of the yeast α-mating system, or the GPD promoter, and will typically have elements that facilitate transcription termination, such as the transcription termination signals from the CYC1 or ADH1 gene.

[0210] Expression vectors useful for expressing proteins in mammalian cells will include a promoter active in mammalian cells. These promoters include, but are not limited to, those derived from mammalian viruses, such as the enhancer-promoter sequences from the immediate early gene of the human cytomegalovirus (CMV), the enhancer-promoter sequences from the Rous sarcoma virus long terminal repeat (RSV LTR), the enhancer-promotor from SV40 and the early and late promoters of adenovirus. Other expression control sequences include the promoter for 3-phosphoglycerate kinase or other glycolytic enzymes, the promoters of acid phosphatase. Other expression control sequences include those from the gene comprising the OSNA of interest. Often, expression is enhanced by incorporation of polyadenylation sites, such as the late SV40 polyadenylation site and the polyadenylation signal and transcription termination sequences from the bovine growth hormone (BGH) gene, and ribosome binding sites. Furthermore, vectors can include introns, such as intron II of rabbit β-globin gene and the SV40 splice elements.

[0211] Preferred nucleic acid vectors also include a selectable or amplifiable marker gene and means for amplifying the copy number of the gene of interest. Such marker genes are well known in the art. Nucleic acid vectors may also comprise stabilizing sequences (e.g., ori- or ARS-like sequences and telomere-like sequences), or may alternatively be designed to favor directed or non-directed integration into the host cell genome. In a preferred embodiment, nucleic acid sequences of this invention are inserted in frame into an expression vector that allows a high level expression of an RNA which encodes a protein comprising the encoded nucleic acid sequence of interest. Nucleic acid cloning and sequencing methods are well known to those of skill in the art and are described in an assortment of laboratory manuals, including Sambrook (1989), supra, Sambrook (2000), supra; and Ausubel (1992), supra, Ausubel (1999), supra. Product information from manufacturers of biological, chemical and immunological reagents also provide useful information.

[0212] Expression vectors may be either constitutive or inducible. Inducible vectors include either naturally inducible promoters, such as the trc promoter, which is regulated by the lac operon, and the pL promoter, which is regulated by tryptophan, the MMTV-LTR promoter, which is inducible by dexamethasone, or can contain synthetic promoters and/or additional elements that confer inducible control on adjacent promoters. Examples of inducible synthetic promoters are the hybrid Plac/ara-1 promoter and the PLtetO-1 promoter. The PLtetO-1 promoter takes advantage of the high expression levels from the PL promoter of phage lambda, but replaces the lambda repressor sites with two copies of operator 2 of the Tn10 tetracycline resistance operon, causing this promoter to be tightly repressed by the Tet repressor protein and induced in response to tetracycline (Tc) and Tc derivatives such as anhydrotetracycline. Vectors may also be inducible because they contain hormone response elements, such as the glucocorticoid response element (GRE) and the estrogen response element (ERE), which can confer hormone inducibility where vectors are used for expression in cells having the respective hormone receptors. To reduce background levels of expression, elements responsive to ecdysone, an insect hormone, can be used instead, with coexpression of the ecdysone receptor.

[0213] In one embodiment of the invention, expression vectors can be designed to fuse the expressed polypeptide to small protein tags that facilitate purification and/or visualization. Such tags include a polyhistidine tag that facilitates purification of the fusion protein by immobilized metal affinity chromatography, for example using NiNTA resin (Qiagen Inc., Valencia, Calif., USA) or TALON™ resin (cobalt immobilized affinity chromatography medium, Clontech Labs, Palo Alto, Calif., USA). The fusion protein can include a chitin-binding tag and self-excising intein, permitting chitin-based purification with self-removal of the fused tag (IMPACT™ system, New England Biolabs, Inc., Beverley, Mass., USA). Alternatively, the fusion protein can include a calmodulin-binding peptide tag, permitting purification by calmodulin affinity resin (Stratagene, La Jolla, Calif., USA), or a specifically excisable fragment of the biotin carboxylase carrier protein, permitting purification of in vivo biotinylated protein using an avidin resin and subsequent tag removal (Promega, Madison, Wis., USA). As another useful alternative, the polypeptides of the present invention can be expressed as a fusion to glutathione-S-transferase, the affinity and specificity of binding to glutathione permitting purification using glutathione affinity resins, such as Glutathione-Superflow Resin (Clontech Laboratories, Palo Alto, Calif., USA), with subsequent elution with free glutathione. Other tags include, for example, the Xpress epitope, detectable by anti-Xpress antibody (Invitrogen, Carlsbad, Calif., USA), a myc tag, detectable by anti-myc tag antibody, the V5 epitope, detectable by anti-V5 antibody (Invitrogen, Carlsbad, Calif., USA), FLAG® epitope, detectable by anti-FLAG® antibody (Stratagene, La Jolla, Calif., USA), and the HA epitope, detectable by anti-HA antibody.

[0214] For secretion of expressed polypeptides, vectors can include appropriate sequences that encode secretion signals, such as leader peptides. For example, the pSecTag2 vectors (Invitrogen, Carlsbad, Calif., USA) are 5.2 kb mammalian expression vectors that carry the secretion signal from the V-J2-C region of the mouse Ig kappa-chain for efficient secretion of recombinant proteins from a variety of mammalian cell lines.

[0215] Expression vectors can also be designed to fuse proteins encoded by the heterologous nucleic acid insert to polypeptides that are larger than purification and/or identification tags. Useful protein fusions include those that permit display of the encoded protein on the surface of a phage or cell, fusions to intrinsically fluorescent proteins, such as those that have a green fluorescent protein (GFP)-like chromophore, fusions to the IgG Fc region, and fusions for use in two hybrid systems.

[0216] Vectors for phage display fuse the encoded polypeptide to, e.g., the gene III protein (pIII) or gene VIII protein (pVIII) for display on the surface of filamentous phage, such as M13. See Barbas et al., Phage Display: A Laboratory Manual, Cold Spring Harbor Laboratory Press (2001); Kay et al. (eds.), Phage Display of Peptides and Proteins: A Laboratory Manual, Academic Press, Inc., (1996); Abelson et al. (eds.), Combinatorial Chemistry (Methods in Enzymology, Vol. 267) Academic Press (1996). Vectors for yeast display, e.g. the pYD1 yeast display vector (Invitrogen, Carlsbad, Calif., USA), use the α-agglutinin yeast adhesion receptor to display recombinant protein on the surface of S. cerevisiae. Vectors for mammalian display, e.g., the pDisplay™ vector (Invitrogen, Carlsbad, Calif., USA), target recombinant proteins using an N-terminal cell surface targeting signal and a C-terminal transmembrane anchoring domain of platelet derived growth factor receptor.

[0217] A wide variety of vectors now exist that fuse proteins encoded by heterologous nucleic acids to the chromophore of the substrate-independent, intrinsically fluorescent green fluorescent protein from Aequorea victoria (“GFP”) and its variants. The GFP-like chromophore can be selected from GFP-like chromophores found in naturally occurring proteins, such as A. victoria GFP (GenBank accession number AAA27721), Renilla reniformis GFP, FP583 (GenBank accession no. AF168419) (DsRed), FP593 (AF272711), FP483 (AF168420), FP484 (AF168424), FP595 (AF246709), FP486 (AF168421), FP538 (AF168423), and FP506 (AF168422), and need include only so much of the native protein as is needed to retain the chromophore's intrinsic fluorescence. Methods for determining the minimal domain required for fluorescence are known in the art. See Li et al., J. Biol. Chem. 272: 28545-28549 (1997). Alternatively, the GFP-like chromophore can be selected from GFP-like chromophores modified from those found in nature. The methods for engineering such modified GFP-like chromophores and testing them for fluorescence activity, both alone and as part of protein fusions, are well known in the art. See Heim et al., Curr. Biol. 6: 178-182 (1996) and Palm et al., Methods Enzymol. 302: 378-394 (1999). A variety of such modified chromophores are now commercially available and can readily be used in the fusion proteins of the present invention. These include EGFP (“enhanced GFP”), EBFP (“enhanced blue fluorescent protein”), BFP2, EYFP (“enhanced yellow fluorescent protein”), ECFP (“enhanced cyan fluorescent protein”) or Citrine. EGFP (see, e.g, Cormack et al., Gene 173: 33-38 (1996); U.S. Pat. Nos. 6,090,919 and 5,804,387, the disclosures of which are incorporated herein by reference in their entireties) is found on a variety of vectors, both plasmid and viral, which are available commercially (Clontech Labs, Palo Alto, Calif., USA); EBFP is optimized for expression in mammalian cells whereas BFP2, which retains the original jellyfish codons, can be expressed in bacteria (see, e.g,. Heim et al., Curr. Biol. 6: 178-182 (1996) and Cormack et al., Gene 173: 33-38 (1996)). Vectors containing these blue-shifted variants are available from Clontech Labs (Palo Alto, Calif., USA). Vectors containing EYFP, ECFP (see, e.g., Heim et al., Curr. Biol. 6: 178-182 (1996); Miyawaki et al., Nature 388: 882-887 (1997)) and Citrine (see, e.g., Heikal et al., Proc. Natl. Acad. Sci. USA 97: 11996-12001 (2000)) are also available from Clontech Labs. The GFP-like chromophore can also be drawn from other modified GFPs, including those described in U.S. Pat. Nos. 6,124,128; 6,096,865; 6,090,919; 6,066,476; 6,054,321; 6,027,881; 5,968,750; 5,874,304; 5,804,387; 5,777,079; 5,741,668; and 5,625,048, the disclosures of which are incorporated herein by reference in their entireties. See also Conn (ed.), Green Fluorescent Protein (Methods in Enzymology, Vol. 302), Academic Press, Inc. (1999); Yang, et al., J Biol Chem, 273: 8212-6 (1998); Bevis et al., Nature Biotechnology, 20:83-7 (2002). The GFP-like chromophore of each of these GFP variants can usefully be included in the fusion proteins of the present invention.

[0218] Fusions to the IgG Fc region increase serum half-life of protein pharmaceutical products through interaction with the FcRn receptor (also denominated the FcRp receptor and the Brambell receptor, FcRb), further described in International Patent Application nos. WO 97/43316, WO 97/34631, WO 96/32478, WO 96/18412, the disclosures of which are incorporated herein by reference in their entireties.

[0219] For long-term, high-yield recombinant production of the polypeptides of the present invention, stable expression is preferred. Stable expression is readily achieved by integration into the host cell genome of vectors having selectable markers, followed by selection of these integrants. Vectors such as pUB6/V5-His A, B, and C (Invitrogen, Carlsbad, Calif., USA) are designed for high-level stable expression of heterologous proteins in a wide range of mammalian tissue types and cell lines. pUB6/V5-His uses the promoter/enhancer sequence from the human ubiquitin C gene to drive expression of recombinant proteins: expression levels in 293, CHO, and NIH3T3 cells are comparable to levels from the CMV and human EF-1a promoters. The bsd gene permits rapid selection of stably transfected mammalian cells with the potent antibiotic blasticidin.

[0220] Replication incompetent retroviral vectors, typically derived from Moloney murine leukemia virus, also are useful for creating stable transfectants having integrated provirus. The highly efficient transduction machinery of retroviruses, coupled with the availability of a variety of packaging cell lines such as RetroPack™ PT 67, EcoPack2™-293, AmphoPack-293, and GP2-293 cell lines (all available from Clontech Laboratories, Palo Alto, Calif., USA) allow a wide host range to be infected with high efficiency; varying the multiplicity of infection readily adjusts the copy number of the integrated provirus.

[0221] Of course, not all vectors and expression control sequences will function equally well to express the nucleic acid molecules of this invention. Neither will all hosts function equally well with the same expression system. However, one of skill in the art may make a selection among these vectors, expression control sequences and hosts without undue experimentation and without departing from the scope of this invention. For example, in selecting a vector, the host must be considered because the vector must be replicated in it. The vector's copy number, the ability to control that copy number, the ability to control integration, if any, and the expression of any other proteins encoded by the vector, such as antibiotic or other selection markers, should also be considered. The present invention further includes host cells comprising the vectors of the present invention, either present episomally within the cell or integrated, in whole or in part, into the host cell chromosome. Among other considerations, some of which are described above, a host cell strain may be chosen for its ability to process the expressed polypeptide in the desired fashion. Such post-translational modifications of the polypeptide include, but are not limited to, acetylation, carboxylation, glycosylation, phosphorylation, lipidation, and acylation, and it is an aspect of the present invention to provide OSPs with such post-translational modifications.

[0222] In selecting an expression control sequence, a variety of factors should also be considered. These include, for example, the relative strength of the sequence, its controllability, and its compatibility with the nucleic acid molecules of this invention, particularly with regard to potential secondary structures. Unicellular hosts should be selected by consideration of their compatibility with the chosen vector, the toxicity of the product coded for by the nucleic acid sequences of this invention, their secretion characteristics, their ability to fold the polypeptide correctly, their fermentation or culture requirements, and the ease of purification from them of the products coded for by the nucleic acid molecules of this invention.

[0223] The recombinant nucleic acid molecules and more particularly, the expression vectors of this invention may be used to express the polypeptides of this invention as recombinant polypeptides in a heterologous host cell. The polypeptides of this invention may be full-length or less than full-length polypeptide fragments recombinantly expressed from the nucleic acid molecules according to this invention. Such polypeptides include analogs, derivatives and muteins that may or may not have biological activity.

[0224] Vectors of the present invention will also often include elements that permit in vitro transcription of RNA from the inserted heterologous nucleic acid. Such vectors typically include a phage promoter, such as that from T7, T3, or SP6, flanking the nucleic acid insert. Often two different such promoters flank the inserted nucleic acid, permitting separate in vitro production of both sense and antisense strands.

[0225] Transformation and other methods of introducing nucleic acids into a host cell (e.g., conjugation, protoplast transformation or fusion, transfection, electroporation, liposome delivery, membrane fusion techniques, high velocity DNA-coated pellets, viral infection and protoplast fusion) can be accomplished by a variety of methods which are well known in the art (See, for instance, Ausubel, supra, and Sambrook et al., supra). Bacterial, yeast, plant or mammalian cells are transformed or transfected with an expression vector, such as a plasmid, a cosmid, or the like, wherein the expression vector comprises the nucleic acid of interest. Alternatively, the cells may be infected by a viral expression vector comprising the nucleic acid of interest. Depending upon the host cell, vector, and method of transformation used, transient or stable expression of the polypeptide will be constitutive or inducible. One having ordinary skill in the art will be able to decide whether to express a polypeptide transiently or stably, and whether to express the protein constitutively or inducibly.

[0226] A wide variety of unicellular host cells are useful in expressing the DNA sequences of this invention. These hosts may include well known eukaryotic and prokaryotic hosts, such as strains of, fungi, yeast, insect cells such as Spodoptera frugiperda (SF9), animal cells such as CHO, as well as plant cells in tissue culture. Representative examples of appropriate host cells include, but are not limited to, bacterial cells, such as E. coli, Caulobacter crescentus, Streptomyces species, and Salmonella typhimurium; yeast cells, such as Saccharomyces cerevisiae, Schizosaccharomyces pombe, Pichia pastoris, Pichia methanolica; insect cell lines, such as those from Spodoptera frugiperda—e.g., Sf9 and Sf21 cell lines, and expresSF™ cells (Protein Sciences Corp., Meriden, Conn., USA)—Drosophila S2 cells, and Trichoplusia ni High Five® Cells (Invitrogen, Carlsbad, Calif., USA); and mammalian cells. Typical mammalian cells include BHK cells, BSC 1 cells, BSC 40 cells, BMT 10 cells, VERO cells, COS1 cells, COS7 cells, Chinese hamster ovary (CHO) cells, 3T3 cells, NIH 3T3 cells, 293 cells, HEPG2 cells, HeLa cells, L cells, MDCK cells, HEK293 cells, W138 cells, murine ES cell lines (e.g., from strains 129/SV, C57/BL6, DBA-1, 129/SVJ), K562 cells, Jurkat cells, and BW5147 cells. Other mammalian cell lines are well known and readily available from the American Type Culture Collection (ATCC) (Manassas, Va., USA) and the National Institute of General Medical Sciences (NIGMS) Human Genetic Cell Repository at the Coriell Cell Repositories (Camden, N.J., USA). Cells or cell lines derived from ovarian are particularly preferred because they may provide a more native post-translational processing. Particularly preferred are human ovarian cells.

[0227] Particular details of the transfection, expression and purification of recombinant proteins are well documented and are understood by those of skill in the art. Further details on the various technical aspects of each of the steps used in recombinant production of foreign genes in bacterial cell expression systems can be found in a number of texts and laboratory manuals in the art. See, e.g., Ausubel (1992), supra, Ausubel (1999), supra, Sambrook (1989), supra, and Sambrook (2001), supra.

[0228] Methods for introducing the vectors and nucleic acid molecules of the present invention into the host cells are well known in the art; the choice of technique will depend primarily upon the specific vector to be introduced and the host cell chosen.

[0229] Nucleic acid molecules and vectors may be introduced into prokaryotes, such as E. coli, in a number of ways. For instance, phage lambda vectors will typically be packaged using a packaging extract (e.g., Gigapack® packaging extract, Stratagene, La Jolla, Calif., USA), and the packaged virus used to infect E. coli.

[0230] Plasmid vectors will typically be introduced into chemically competent or electrocompetent bacterial cells. E. coli cells can be rendered chemically competent by treatment, e.g., with CaCl₂, or a solution of Mg²⁺, Mn²⁺, Ca²⁺, Rb⁺ or K⁺, dimethyl sulfoxide, dithiothreitol, and hexamine cobalt (III), Hanahan, J. Mol. Biol. 166(4):557-80 (1983), and vectors introduced by heat shock. A wide variety of chemically competent strains are also available commercially (e.g., Epicurian Coli® XL10-Gold® Ultracompetent Cells (Stratagene, La Jolla, Calif., USA); DH5α competent cells (Clontech Laboratories, Palo Alto, Calif., USA); and TOP10 Chemically Competent E. coli Kit (Invitrogen, Carlsbad, Calif., USA)). Bacterial cells can be rendered electrocompetent to take up exogenous DNA by electroporation by various pre-pulse treatments; vectors are introduced by electroporation followed by subsequent outgrowth in selected media. An extensive series of protocols is provided by BioRad (Richmond, Calif., USA).

[0231] Vectors can be introduced into yeast cells by spheroplasting, treatment with lithium salts, electroporation, or protoplast fusion. Spheroplasts are prepared by the action of hydrolytic enzymes such as a snail-gut extract, usually denoted Glusulase or Zymolyase, or an enzyme from Arthrobacter luteus to remove portions of the cell wall in the presence of osmotic stabilizers, typically 1 M sorbitol. DNA is added to the spheroplasts, and the mixture is co-precipitated with a solution of polyethylene glycol (PEG) and Ca²⁺. Subsequently, the cells are resuspended in a solution of sorbitol, mixed with molten agar and then layered on the surface of a selective plate containing sorbitol.

[0232] For lithium-mediated transformation, yeast cells are treated with lithium acetate to permeabilize the cell wall, DNA is added and the cells are co-precipitated with PEG. The cells are exposed to a brief heat shock, washed free of PEG and lithium acetate, and subsequently spread on plates containing ordinary selective medium. Increased frequencies of transformation are obtained by using specially-prepared single-stranded carrier DNA and certain organic solvents. Schiestl et al., Curr. Genet. 16(5-6): 339-46 (1989).

[0233] For electroporation, freshly-grown yeast cultures are typically washed, suspended in an osmotic protectant, such as sorbitol, mixed with DNA, and the cell suspension pulsed in an electroporation device. Subsequently, the cells are spread on the surface of plates containing selective media. Becker et al., Methods Enzymol. 194: 182-187 (1991). The efficiency of transformation by electroporation can be increased over 100-fold by using PEG, single-stranded carrier DNA and cells that are in late log-phase of growth. Larger constructs, such as YACs, can be introduced by protoplast fusion.

[0234] Mammalian and insect cells can be directly infected by packaged viral vectors, or transfected by chemical or electrical means. For chemical transfection, DNA can be coprecipitated with CaPO₄ or introduced using liposomal and nonliposomal lipid-based agents. Commercial kits are available for CaPO₄ transfection (CalPhos™ Mammalian Transfection Kit, Clontech Laboratories, Palo Alto, Calif., USA), and lipid-mediated transfection can be practiced using commercial reagents, such as LIPOFECTAMINE™ 2000, LIPOFECTAMINE™ Reagent, CELLFECTIN® Reagent, and LIPOFECTIN® Reagent (Invitrogen, Carlsbad, Calif., USA), DOTAP Liposomal Transfection Reagent, FuGENE 6, X-tremeGENE Q2, DOSPER, (Roche Molecular Biochemicals, Indianapolis, Ind. USA), Effectene™, PolyFect®, Superfect® (Qiagen, Inc., Valencia, Calif., USA). Protocols for electroporating mammalian cells can be found in, for example,; Norton et al. (eds.), Gene Transfer Methods: Introducing DNA into Living Cells and Organisms, BioTechniques Books, Eaton Publishing Co. (2000). Other transfection techniques include transfection by particle bombardment and microinjection. See, e.g., Cheng et al., Proc. Natl. Acad. Sci. USA 90(10): 4455-9 (1993); Yang et al., Proc. Natl. Acad. Sci. USA 87(24): 9568-72 (1990).

[0235] Production of the recombinantly produced proteins of the present invention can optionally be followed by purification.

[0236] Purification of recombinantly expressed proteins is now well within the skill in the art and thus need not be detailed here. See, e.g., Thorner et al (eds.), Applications of Chimeric Genes and Hybrid Proteins, Part A: Gene Expression and Protein Purification (Methods in Enzymology, Vol. 326), Academic Press (2000); Harbin (ed.), Cloning, Gene Expression and Protein Purification: Experimental Procedures and Process Rationale, Oxford Univ. Press (2001); Marshak et al., Strategies for Protein Purification and Characterization: A Laboratory Course Manual, Cold Spring Harbor Laboratory Press (1996); and Roe (ed.), Protein Purification Applications, Oxford University Press (2001).

[0237] Briefly, however, if purification tags have been fused through use of an expression vector that appends such tag, purification can be effected, at least in part, by means appropriate to the tag, such as use of immobilized metal affinity chromatography for polyhistidine tags. Other techniques common in the art include ammonium sulfate fractionation, immunoprecipitation, fast protein liquid chromatography (FPLC), high performance liquid chromatography (HPLC), and preparative gel electrophoresis.

Polypeptides, Including Fragments Muteins, Homologous Proteins, Allelic Variants, Analogs and Derivatives

[0238] Another aspect of the invention relates to polypeptides encoded by the nucleic acid molecules described herein. In a preferred embodiment, the polypeptide is a ovarian specific polypeptide (OSP). In an even more preferred embodiment, the polypeptide comprises an amino acid sequence of SEQ ID NO:101-240 or is derived from a polypeptide having the amino acid sequence of SEQ ID NO: 101-240. A polypeptide as defined herein may be produced recombinantly, as discussed supra, may be isolated from a cell that naturally expresses the protein, or may be chemically synthesized following the teachings of the specification and using methods well known to those having ordinary skill in the art.

[0239] Polypeptides of the present invention may also comprise a part or fragment of a OSP. In a preferred embodiment, the fragment is derived from a polypeptide having an amino acid sequence selected from the group consisting of SEQ ID NO: 101-240. Polypeptides of the present invention comprising a part or fragment of an entire OSP may or may not be OSPs. For example, a full-length polypeptide may be ovarian-specific, while a fragment thereof may be found in other tissues as well as in ovarian. A polypeptide that is not a OSP, whether it is a fragment, analog, mutein, homologous protein or derivative, is nevertheless useful, especially for immunizing animals to prepare anti-OSP antibodies. In a preferred embodiment, the part or fragment is a OSP. Methods of determining whether a polypeptide of the present invention is a OSP are described infra.

[0240] Polypeptides of the present invention comprising fragments of at least 6 contiguous amino acids are also useful in mapping B cell and T cell epitopes of the reference protein. See, e.g., Geysen et al., Proc. Natl. Acad. Sci. USA 81: 3998-4002 (1984) and U.S. Pat. Nos. 4,708,871 and 5,595,915, the disclosures of which are incorporated herein by reference in their entireties. Because the fragment need not itself be immunogenic, part of an immunodominant epitope, nor even recognized by native antibody, to be useful in such epitope mapping, all fragments of at least 6 amino acids of a polypeptide of the present invention have utility in such a study.

[0241] Polypeptides of the present invention comprising fragments of at least 8 contiguous amino acids, often at least 15 contiguous amino acids, are useful as immunogens for raising antibodies that recognize polypeptides of the present invention. See, e.g., Lemer, Nature 299: 592-596 (1982); Shinnick et al., Annu. Rev. Microbiol. 37: 425-46 (1983); Sutcliffe et al., Science 219: 660-6 (1983). As further described in the above-cited references, virtually all 8-mers, conjugated to a carrier, such as a protein, prove immunogenic and are capable of eliciting antibody for the conjugated peptide; accordingly, all fragments of at least 8 amino acids of the polypeptides of the present invention have utility as immunogens.

[0242] Polypeptides comprising fragments of at least 8, 9, 10 or 12 contiguous amino acids are also useful as competitive inhibitors of binding of the entire polypeptide, or a portion thereof, to antibodies (as in epitope mapping), and to natural binding partners, such as subunits in a multimeric complex or to receptors or ligands of the subject protein; this competitive inhibition permits identification and separation of molecules that bind specifically to the polypeptide of interest. See U.S. Pat. Nos. 5,539,084 and 5,783,674, incorporated herein by reference in their entireties.

[0243] The polypeptide of the present invention thus preferably is at least 6 amino acids in length, typically at least 8, 9, 10 or 12 amino acids in length, and often at least 15 amino acids in length. Often, the polypeptide of the present invention is at least 20 amino acids in length, even 25 amino acids, 30 amino acids, 35 amino acids, or 50 amino acids or more in length. Of course, larger polypeptides having at least 75 amino acids, 100 amino acids, or even 150 amino acids are also useful, and at times preferred.

[0244] One having ordinary skill in the art can produce fragments by truncating the nucleic acid molecule, e.g., a OSNA, encoding the polypeptide and then expressing it recombinantly. Alternatively, one can produce a fragment by chemically synthesizing a portion of the full-length polypeptide. One may also produce a fragment by enzymatically cleaving either a recombinant polypeptide or an isolated naturally occurring polypeptide. Methods of producing polypeptide fragments are well known in the art. See, e.g., Sambrook (1989), supra; Sambrook (2001), supra; Ausubel (1992), supra; and Ausubel (1999), supra. In one embodiment, a polypeptide comprising only a fragment, preferably a fragment of a OSP, may be produced by chemical or enzymatic cleavage of a OSP polypeptide. In a preferred embodiment, a polypeptide fragment is produced by expressing a nucleic acid molecule of the present invention encoding a fragment, preferably of a OSP, in a host cell.

[0245] Polypeptides of the present invention are also inclusive of mutants, fusion proteins, homologous proteins and allelic variants.

[0246] A mutant protein, or mutein, may have the same or different properties compared to a naturally occurring polypeptide and comprises at least one amino acid insertion, duplication, deletion, rearrangement or substitution compared to the amino acid sequence of a native polypeptide. Small deletions and insertions can often be found that do not alter the function of a protein. Muteins may or may not be ovarian-specific. Preferably, the mutein is ovarian-specific. More preferably the mutein is a polypeptide that comprises at least one amino acid insertion, duplication, deletion, rearrangement or substitution compared to the amino acid sequence of SEQ ID NO: 101-240. Accordingly, in a preferred embodiment, the mutein is one that exhibits at least 50% sequence identity, more preferably at least 60% sequence identity, even more preferably at least 70%, yet more preferably at least 80% sequence identity to a OSP comprising an amino acid sequence of SEQ ID NO: 101-240. In a yet more preferred embodiment, the mutein exhibits at least 85%, more preferably 90%, even more preferably 95% or 96%, and yet more preferably at least 97%, 98%, 99% or 99.5% sequence identity to a OSP comprising an amino acid sequence of SEQ ID NO: 101-240.

[0247] A mutein may be produced by isolation from a naturally occurring mutant cell, tissue or organism. A mutein may be produced by isolation from a cell, tissue or organism that has been experimentally mutagenized. Alternatively, a mutein may be produced by chemical manipulation of a polypeptide, such as by altering the amino acid residue to another amino acid residue using synthetic or semi-synthetic chemical techniques. In a preferred embodiment, a mutein is produced from a host cell comprising a mutated nucleic acid molecule compared to the naturally occurring nucleic acid molecule. For instance, one may produce a mutein of a polypeptide by introducing one or more mutations into a nucleic acid molecule of the invention and then expressing it recombinantly. These mutations may be targeted, in which particular encoded amino acids are altered, or may be untargeted, in which random encoded amino acids within the polypeptide are altered. Muteins with random amino acid alterations can be screened for a particular biological activity or property, particularly whether the polypeptide is ovarian-specific, as described below. Multiple random mutations can be introduced into the gene by methods well known to the art, e.g., by error-prone PCR, shuffling, oligonucleotide-directed mutagenesis, assembly PCR, sexual PCR mutagenesis, in vivo mutagenesis, cassette mutagenesis, recursive ensemble mutagenesis, exponential ensemble mutagenesis and site-specific mutagenesis. Methods of producing muteins with targeted or random amino acid alterations are well known in the art. See, e.g., Sambrook (1989), supra; Sambrook (2001), supra; Ausubel (1992), supra; and Ausubel (1999), as well as U.S. Pat. No. 5,223,408, which is herein incorporated by reference in its entirety.

[0248] The invention also contemplates polypeptides that are homologous to a polypeptide of the invention. In a preferred embodiment, the polypeptide is homologous to a OSP. In an even more preferred embodiment, the polypeptide is homologous to a OSP selected from the group having an amino acid sequence of SEQ ID NO: 101-240. By homologous polypeptide it is means one that exhibits significant sequence identity to a OSP, preferably a OSP having an amino acid sequence of SEQ ID NO: 101-240. By significant sequence identity it is meant that the homologous polypeptide exhibits at least 50% sequence identity, more preferably at least 60% sequence identity, even more preferably at least 70%, yet more preferably at least 80% sequence identity to a OSP comprising an amino acid sequence of SEQ ID NO: 101-240. More preferred are homologous polypeptides exhibiting at least 85%, more preferably 90%, even more preferably 95% or 96%, and yet more preferably at least 97% or 98% sequence identity to a OSP comprising an amino acid sequence of SEQ ID NO: 101-240. Most preferably, the homologous polypeptide exhibits at least 99%, more preferably 99.5%, even more preferably 99.6%, 99.7%, 99.8% or 99.9% sequence identity to a OSP comprising an amino acid sequence of SEQ ID NO: 101-240. In a preferred embodiment, the amino acid substitutions of the homologous polypeptide are conservative amino acid substitutions as discussed above.

[0249] Homologous polypeptides of the present invention also comprise polypeptide encoded by a nucleic acid molecule that selectively hybridizes to a OSNA or an antisense sequence thereof. In this embodiment, it is preferred that the homologous polypeptide be encoded by a nucleic acid molecule that hybridizes to a OSNA under low stringency, moderate stringency or high stringency conditions, as defined herein. More preferred is a homologous polypeptide encoded by a nucleic acid sequence which hybridizes to a OSNA selected from the group consisting of SEQ ID NO: 1-100 or a homologous polypeptide encoded by a nucleic acid molecule that hybridizes to a nucleic acid molecule that encodes a OSP, preferably an OSP of SEQ ID NO:101-240 under low stringency, moderate stringency or high stringency conditions, as defined herein.

[0250] Homologous polypeptides of the present invention may be naturally occurring and derived from another species, especially one derived from another primate, such as chimpanzee, gorilla, rhesus macaque, or baboon, wherein the homologous polypeptide comprises an amino acid sequence that exhibits significant sequence identity to that of SEQ ID NO: 101-240. The homologous polypeptide may also be a naturally occurring polypeptide from a human, when the OSP is a member of a family of polypeptides. The homologous polypeptide may also be a naturally occurring polypeptide derived from a non-primate, mammalian species, including without limitation, domesticated species, e.g., dog, cat, mouse, rat, rabbit, guinea pig, hamster, cow, horse, goat or pig. The homologous polypeptide may also be a naturally occurring polypeptide derived from a non-mammalian species, such as birds or reptiles. The naturally occurring homologous protein may be isolated directly from humans or other species. Alternatively, the nucleic acid molecule encoding the naturally occurring homologous polypeptide may be isolated and used to express the homologous polypeptide recombinantly. The homologous polypeptide may also be one that is experimentally produced by random mutation of a nucleic acid molecule and subsequent expression of the nucleic acid molecule. Alternatively, the homologous polypeptide may be one that is experimentally produced by directed mutation of one or more codons to alter the encoded amino acid of a OSP. In a preferred embodiment, the homologous polypeptide encodes a polypeptide that is a OSP.

[0251] Relatedness of proteins can also be characterized using a second functional test, the ability of a first protein competitively to inhibit the binding of a second protein to an antibody. It is, therefore, another aspect of the present invention to provide isolated polypeptide not only identical in sequence to those described with particularity herein, but also to provide isolated polypeptide (“cross-reactive proteins”) that competitively inhibit the binding of antibodies to all or to a portion of various of the isolated polypeptides of the present invention. Such competitive inhibition can readily be determined using immunoassays well known in the art.

[0252] As discussed above, single nucleotide polymorphisms (SNPs) occur frequently in eukaryotic genomes, and the sequence determined from one individual of a species may differ from other allelic forms present within the population. Thus, polypeptides of the present invention are also inclusive of those encoded by an allelic variant of a nucleic acid molecule encoding a OSP. In this embodiment, it is preferred that the polypeptide be encoded by an allelic variant of a gene that encodes a polypeptide having the amino acid sequence selected from the group consisting of SEQ ID NO: 101-240. More preferred is that the polypeptide be encoded by an allelic variant of a gene that has the nucleic acid sequence selected from the group consisting of SEQ ID NO: 1-100.

[0253] Polypeptides of the present invention are also inclusive of derivative polypeptides encoded by a nucleic acid molecule according to the instant invention. In this embodiment, it is preferred that the polypeptide be a OSP. Also preferred are derivative polypeptides having an amino acid sequence selected from the group consisting of SEQ ID NO: 101-240 and which has been acetylated, carboxylated, phosphorylated, glycosylated, ubiquitinated or other PTMs. In another preferred embodiment, the derivative has been labeled with, e.g., radioactive isotopes such as ¹²⁵I, ³²P, ³⁵S, and ³H. In another preferred embodiment, the derivative has been labeled with fluorophores, chemiluminescent agents, enzymes, and antiligands that can serve as specific binding pair members for a labeled ligand.

[0254] Polypeptide modifications are well known to those of skill and have been described in great detail in the scientific literature. Several particularly common modifications, glycosylation, lipid attachment, sulfation, gamma-carboxylation of glutamic acid residues, hydroxylation and ADP-ribosylation, for instance, are described in most basic texts, such as, for instance Creighton, Protein Structure and Molecular Properties, 2nd ed., W. H. Freeman and Company (1993). Many detailed reviews are available on this subject, such as, for example, those provided by Wold, in Johnson (ed.), Posttranslational Covalent Modification of Proteins, pgs. 1-12, Academic Press (1983); Seifter et al., Meth. Enzymol. 182: 626-646 (1990) and Rattan et al., Ann. N.Y. Acad. Sci. 663: 48-62 (1992).

[0255] One may determine whether a polypeptide of the invention is likely to be post-translationally modified by analyzing the sequence of the polypeptide to determine if there are peptide motifs indicative of sites for post-translational modification. There are a number of computer programs that permit prediction of post-translational modifications. See, e.g., expasy with the extension org of the world wide web (accessed Nov. 11, 2002), which includes PSORT, for prediction of protein sorting signals and localization sites, SignalP, for prediction of signal peptide cleavage sites, MITOPROT and Predotar, for prediction of mitochondrial targeting sequences, NetOGlyc, for prediction of type O-glycosylation sites in mammalian proteins, big-PI Predictor and DGPI, for prediction of prenylation-anchor and cleavage sites, and NetPhos, for prediction of Ser, Thr and Tyr phosphorylation sites in eukaryotic proteins. Other computer programs, such as those included in GCG, also may be used to determine post-translational modification peptide motifs.

[0256] General examples of types of post-translational modifications include, but are not limited to: (Z)-dehydrobutyrine; 1-chondroitin sulfate-L-aspartic acid ester; 1′-glycosyl-L-tryptophan; 1′-phospho-L-histidine; 1-thioglycine; 2′-(S-L-cysteinyl)-L-histidine; 2′-[3-carboxamido(trimethylammonio)propyl]-L-histidine; 2′-alpha-mannosyl-L-tryptophan; 2-methyl-L-glutamine; 2-oxobutanoic acid; 2-pyrrolidone carboxylic acid; 3′-(1′-L-histidyl)-L-tyrosine; 3′-(8alpha-FAD)-L-histidine; 3′-(S-L-cysteinyl)-L-tyrosine; 3′,3″,5′-triiodo-L-thyronine; 3′-4′-phospho-L-tyrosine; 3-hydroxy-L-proline; 3′-methyl-L-histidine; 3-methyl-L-lanthionine; 3′-phospho-L-histidine; 4′-(L-tryptophan)-L-tryptophyl quinone; 42 N-cysteinyl-glycosylphosphatidylinositolethanolamine; 43-(T-L-histidyl)-L-tyrosine; 4-hydroxy-L-arginine; 4-hydroxy-L-lysine; 4-hydroxy-L-proline; 5′-(N6-L-lysine)-L-topaquinone; 5-hydroxy-L-lysine; 5-methyl-L-arginine; alpha-1-microglobulin-Ig alpha complex chromophore; bis-L-cysteinyl bis-L-histidino diiron disulfide; bis-L--cysteinyl-L-N3′-histidino-L-serinyI tetrairon′ tetrasulfide; chondroitin sulfate D-glucuronyl-D-galactosyl-D-galactosyl-D-xylosyl-L-serine; D-alanine; D-allo-isoleucine; D-asparagine; dehydroalanine; dehydrotyrosine; dermatan 4-sulfate D-glucuronyl-D-galactosyl-D-galactosyl-D-xylosyl-L-serine; D-glucuronyl-N-glycine; dipyrrolylmethanemethyl-L-cysteine; D-leucine; D-methionine; D-phenylalanine; D-serine; D-tryptophan; glycine amide; glycine oxazolecarboxylic acid; glycine thiazolecarboxylic acid; heme P450-bis-L-cysteine-L-tyrosine; heme-bis-L-cysteine; hemediol-L-aspartyl ester-L-glutamyl ester; hemediol-L-aspartyl ester-L-glutamyl ester-L-methionine sulfonium; heme-L-cysteine; heme-L-histidine; heparan sulfate D-glucuronyl-D-galactosyl-D-galactosyl-D-xylosyl-L-serine; heme P450-bis-L-cysteine-L-lysine; hexakis-L-cysteinyl hexairon hexasulfide; keratan sulfate D-glucuronyl-D-galactosyl-D-galactosyl-D-xylosyl-L-threonine; L oxoalanine-lactic acid; L phenyllactic acid; 1′-(8alpha-FAD)-L-histidine; L-2′,4′,5′-topaquinone; L-3′,4′-dihydroxyphenylalanine; L-3′,4′,5′-trihydroxyphenylalanine; L-4′-bromophenylalanine; L-6′-bromotryptophan; L-alanine amide; L-alanyl imidazolinone glycine; L-allysine; L-arginine amide; L-asparagine amide; L-aspartic 4-phosphoric anhydride; L-aspartic acid 1-amide; L-beta-methylthioaspartic acid; L-bromohistidine; L-citrulline; L-cysteine amide; L-cysteine glutathione disulfide; L-cysteine methyl disulfide; L-cysteine methyl ester; L-cysteine oxazolecarboxylic acid; L-cysteine oxazolinecarboxylic acid; L-cysteine persulfide; L-cysteine sulfenic acid; L-cysteine sulfinic acid; L-cysteine thiazolecarboxylic acid; L-cysteinyl homocitryl molybdenum-heptairon-nonasulfide; L-cysteinyl imidazolinone glycine; L-cysteinyl molybdopterin; L-cysteinyl molybdopterin guanine dinucleotide; L-cystine; L-erythro-beta-hydroxyasparagine; L-erythro-beta-hydroxyaspartic acid; L-gamma-carboxyglutamic acid; L-glutamic acid 1-amide; L-glutamic acid 5-methyl ester; L-glutamine amide; L-glutamyl 5-glycerylphosphorylethanolamine; L-histidine amide; L-isoglutamyl-polyglutamic acid; L-isoglutamyl-polyglycine; L-isoleucine amide; L-lanthionine; L-leucine amide; L-lysine amide; L-lysine thiazolecarboxylic acid; L-lysinoalanine; L-methionine amide; L-methionine sulfone; L-phenyalanine thiazolecarboxylic acid; L-phenylalanine amide; L-proline amide; L-selenocysteine; L-selenocysteinyl molybdopterin guanine dinucleotide; L-serine amide; L-serine thiazolecarboxylic acid; L-seryl imidazolinone glycine; L-T-bromophenylalanine; L-T-bromophenylalanine; L-threonine amide; L-thyroxine; L-tryptophan amide; L-tryptophyl quinone; L-tyrosine amide; L-valine amide; meso-lanthionine; N-(L-glutamyl)-L-tyrosine; N-(L-isoaspartyl)-glycine; N-(L-isoaspartyl)-L-cysteine; N,N,N-trimethyl-L-alanine; N,N-dimethyl-L-proline; N2-acetyl-L-lysine; N2-succinyl-L-tryptophan; N4-(ADP-ribosyl)-L-asparagine; N4-glycosyl-L-asparagine; N4-hydroxymethyl-L-asparagine; N4-methyl-L-asparagine; N5-methyl-L-glutamine; N6-1-carboxyethyl-L-lysine; N6-(4-amino hydroxybutyl)-L-lysine; N6-(L-isoglutamyl)-L-lysine; N6-(phospho-5′-adenosine)-L-lysine; N6-(phospho-5′-guanosine)-L-lysine; N6,N6,N6-trimethyl-L-lysine; N6,N6-dimethyl-L-lysine; N6-acetyl-L-lysine; N6-biotinyl-L-lysine; N6-carboxy-L-lysine; N6-formyl-L-lysine; N6-glycyl-L-lysine; N6-lipoyl-L-lysine; N6-methyl-L-lysine; N6-methyl-N6-poly(N-methyl-propylamine)-L-lysine; N6-mureinyl-L-lysine; N6-myristoyl-L-lysine; N6-palmitoyl-L-lysine; N6-pyridoxal phosphate-L-lysine; N6-pyruvic acid 2-iminyl-L-lysine; N6-retinal-L-lysine; N-acetylglycine; N-acetyl-L-glutamine; N-acetyl-L-alanine; N-acetyl-L-aspartic acid; N-acetyl-L-cysteine; N-acetyl-L-glutamic acid; N-acetyl-L-isoleucine; N-acetyl-L-methionine; N-acetyl-L-proline; N-acetyl-L-serine; N-acetyl-L-threonine; N-acetyl-L-tyrosine; N-acetyl-L-valine; N-alanyl-glycosylphosphatidylinositolethanolamine; N-asparaginyl-glycosylphosphatidylinositolethanolarnine; N-aspartyl-glycosylphosphatidylinositolethanolamine; N-formylglycine; N-formyl-L-methionine; N-glycyl-glycosylphosphatidylinositolethanolamine; N-L-glutamyl-poly-L-glutamic acid; N-methylglycine; N-methyl-L-alanine; N-methyl-L-methionine; N-methyl-L-phenylalanine; N-myristoyl-glycine; N-palmitoyl-L-cysteine; N-pyruvic acid 2-iminyl-L-cysteine; N-pyruvic acid 2-iminyl-L-valine; N-seryl-glycosylphosphatidylinositolethanolamine; N-seryl-glycosyOSPhingolipidinositolethanolamine; O-(ADP-ribosyl)-L-serine; O-(phospho-5′-adenosine)-L-threonine; O-(phospho-5′-DNA)-L-serine; O-(phospho-5′-DNA)-L-threonine; O-(phospho-5′rRNA)-L-serine; O-(phosphoribosyl dephospho-coenzyme A)-L-serine; O-(sn-1-glycerophosphoryl)-L-serine; O4′-(8alpha-FAD)-L-tyrosine; O4′-(phospho-5′-adenosine)-L-tyrosine; O4′-(phospho-5′-DNA)-L-tyrosine; O4′-(phospho-5′-RNA)-L-tyrosine; O4′-(phospho-5′-uridine)-L-tyrosine; O4-glycosyl-L-hydroxyproline; O4′-glycosyl-L-tyrosine; O4′-sulfo-L-tyrosine; O5-glycosyl-L-hydroxylysine; O-glycosyl-L-serine; O-glycosyl-L-threonine; omega-N-(ADP-ribosyl)-L-arginine; omega-N-omega-N′-dimethyl-L-arginine; omega-N-methyl-L-arginine; omega-N-omega-N-dimethyl-L-arginine; omega-N-phospho-L-arginine; O′octanoyl-L-serine; O-palmitoyl-L-serine; O-palmitoyl-L-threonine; O-phospho-L-serine; O-phospho-L-threonine; O-phosphopantetheine-L-serine; phycoerythrobilin-bis-L-cysteine; phycourobilin-bis-L-cysteine; pyrroloquinoline quinone; pyruvic acid; S hydroxycinnamyl-L-cysteine; S-(2-aminovinyl)methyl-D-cysteine; S-(2-aminovinyl)-D-cysteine; S-(6-FW-L-cysteine; S-(8alpha-FAD)-L-cysteine; S-(ADP-ribosyl)-L-cysteine; S-(L-isoglutamyl)-L-cysteine; S-12-hydroxyfarnesyl-L-cysteine; S-acetyl-L-cysteine; S-diacylglycerol-L-cysteine; S-diphytanylglycerot diether-L-cysteine; S-famesyl-L-cysteine; S-geranylgeranyl-L-cysteine; S-glycosyl-L-cysteine; S-glycyl-L-cysteine; S-methyl-L-cysteine; S-nitrosyl-L-cysteine; S-palmitoyl-L-cysteine; S-phospho-L-cysteine; S-phycobiliviolin-L-cysteine; S-phycocyanobilin-L-cysteine; S-phycoerythrobilin-L-cysteine; S-phytochromobilin-L-cysteine; S-selenyl-L-cysteine; S-sulfo-L-cysteine; tetrakis-L-cysteinyl diiron disulfide; tetrakis-L-cysteinyl iron; tetrakis-L-cysteinyl tetrairon tetrasulfide; trans-2,3-cis 4-dihydroxy-L-proline; tris-L-cysteinyl triiron tetrasulfide; tris-L-cysteinyl triiron trisulfide; tris-L-cysteinyl-L-aspartato tetrairon tetrasulfide; tris-L-cysteinyl-L-cysteine persulfido-bis-L-glutamato-L-histidino tetrairon disulfide trioxide; tris-L-cysteinyl-L-N3′-histidino tetrairon tetrasulfide; tris-L-cysteinyl-L-N1′-histidino tetrairon tetrasulfide; and tris-L-cysteinyl-L-serinyl tetrairon tetrasulfide.

[0257] Additional examples of PTMs may be found in web sites such as the Delta Mass database based on Krishna, R. G. and F. Wold (1998). Posttranslational Modifications. Proteins—Analysis and Design. R. H. Angeletti. San Diego, Academic Press. 1: 121-206.; Methods in Enzymology, 193, J. A. McClosky (ed) (1990), pages 647-660; Methods in Protein Sequence Analysis edited by Kazutomo Imahori and Fumio Sakiyama, Plenum Press, (1993) “Post-translational modifications of proteins” R. G. Krishna and F. Wold pages 167-172; “GlycoSuiteDB: a new curated relational database of glycoprotein glycan structures and their biological sources” Cooper et al. Nucleic Acids Res. 29; 332-335 (2001) “O-GLYCBASE version 4.0: a revised database of O-glycosylated proteins” Gupta et al. Nucleic Acids Research, 27: 370-372 (1999); and “PhosphoBase, a database of phosphorylation sites: release 2.0.”, Kreegipuu et al. Nucleic Acids Res 27(1):237-239 (1999) see also, WO 02/21139A2, the disclosure of which is incorporated herein by reference in its entirety.

[0258] Tumorigenesis is often accompanied by alterations in the post-translational modifications of proteins. Thus, in another embodiment, the invention provides polypeptides from cancerous cells or tissues that have altered post-translational modifications compared to the post-translational modifications of polypeptides from normal cells or tissues. A number of altered post-translational modifications are known. One common alteration is a change in phosphorylation state, wherein the polypeptide from the cancerous cell or tissue is hyperphosphorylated or hypophosphorylated compared to the polypeptide from a normal tissue, or wherein the polypeptide is phosphorylated on different residues than the polypeptide from a normal cell. Another common alteration is a change in glycosylation state, wherein the polypeptide from the cancerous cell or tissue has more or less glycosylation than the polypeptide from a normal tissue, and/or wherein the polypeptide from the cancerous cell or tissue has a different type of glycosylation than the polypeptide from a noncancerous cell or tissue. Changes in glycosylation may be critical because carbohydrate-protein and carbohydrate-carbohydrate interactions are important in cancer cell progression, dissemination and invasion. See, e.g., Barchi, Curr. Pharm. Des. 6: 485-501 (2000), Verma, Cancer Biochem. Biophys. 14: 151-162 (1994) and Dennis et al., Bioessays 5: 412-421 (1999).

[0259] Another post-translational modification that may be altered in cancer cells is prenylation. Prenylation is the covalent attachment of a hydrophobic prenyl group (either famesyl or geranylgeranyl) to a polypeptide. Prenylation is required for localizing a protein to a cell membrane and is often required for polypeptide function. For instance, the Ras superfamily of GTPase signaling proteins must be prenylated for function in a cell. See, e.g., Prendergast et al., Semin. Cancer Biol. 10: 443-452 (2000) and Khwaja et al., Lancet 355: 741-744 (2000).

[0260] Other post-translation modifications that may be altered in cancer cells include, without limitation, polypeptide methylation, acetylation, arginylation or racemization of amino acid residues. In these cases, the polypeptide from the cancerous cell may exhibit either increased or decreased amounts of the post-translational modification compared to the corresponding polypeptides from noncancerous cells.

[0261] Other polypeptide alterations in cancer cells include abnormal polypeptide cleavage of proteins and aberrant protein-protein interactions. Abnormal polypeptide cleavage may be cleavage of a polypeptide in a cancerous cell that does not usually occur in a normal cell, or a lack of cleavage in a cancerous cell, wherein the polypeptide is cleaved in a normal cell. Aberrant protein-protein interactions may be either covalent cross-linking or non-covalent binding between proteins that do not normally bind to each other. Alternatively, in a cancerous cell, a protein may fail to bind to another protein to which it is bound in a noncancerous cell. Alterations in cleavage or in protein-protein interactions may be due to over- or underproduction of a polypeptide in a cancerous cell compared to that in a normal cell, or may be due to alterations in post-translational modifications (see above) of one or more proteins in the cancerous cell. See, e.g., Henschen-Edman, Ann. N.Y. Acad. Sci. 936: 580-593 (2001).

[0262] Alterations in polypeptide post-translational modifications, as well as changes in polypeptide cleavage and protein-protein interactions, may be determined by any method known in the art. For instance, alterations in phosphorylation may be determined by using anti-phosphoserine, anti-phosphothreonine or anti-phosphotyrosine antibodies or by amino acid analysis. Glycosylation alterations may be determined using antibodies specific for different sugar residues, by carbohydrate sequencing, or by alterations in the size of the glycoprotein, which can be determined by, e.g., SDS polyacrylamide gel electrophoresis (PAGE). Other alterations of post-translational modifications, such as prenylation, racemization, methylation, acetylation and arginylation, may be determined by chemical analysis, protein sequencing, amino acid analysis, or by using antibodies specific for the particular post-translational modifications. Changes in protein-protein interactions and in polypeptide cleavage may be analyzed by any method known in the art including, without limitation, non-denaturing PAGE (for non-covalent protein-protein interactions), SDS PAGE (for covalent protein-protein interactions and protein cleavage), chemical cleavage, protein sequencing or immunoassays.

[0263] In another embodiment, the invention provides polypeptides that have been post-translationally modified. In one embodiment, polypeptides may be modified enzymatically or chemically, by addition or removal of a post-translational modification. For example, a polypeptide may be glycosylated or deglycosylated enzymatically. Similarly, polypeptides may be phosphorylated using a purified kinase, such as a MAP kinase (e.g, p38, ERK, or JNK) or a tyrosine kinase (e.g., Src or erbB2). A polypeptide may also be modified through synthetic chemistry. Alternatively, one may isolate the polypeptide of interest from a cell or tissue that expresses the polypeptide with the desired post-translational modification. In another embodiment, a nucleic acid molecule encoding the polypeptide of interest is introduced into a host cell that is capable of post-translationally modifying the encoded polypeptide in the desired fashion. If the polypeptide does not contain a motif for a desired post-translational modification, one may alter the post-translational modification by mutating the nucleic acid sequence of a nucleic acid molecule encoding the polypeptide so that it contains a site for the desired post-translational modification. Amino acid sequences that may be post-translationally modified are known in the art. See, e.g., the programs described above on the website expasy with the extension org of the world wide web. The nucleic acid molecule may also be introduced into a host cell that is capable of post-translationally modifying the encoded polypeptide. Similarly, one may delete sites that are post-translationally modified by either mutating the nucleic acid sequence so that the encoded polypeptide does not contain the post-translational modification motif, or by introducing the native nucleic acid molecule into a host cell that is not capable of post-translationally modifying the encoded polypeptide.

[0264] It will be appreciated, as is well known and as noted above, that polypeptides are not always entirely linear. For instance, polypeptides may be branched as a result of ubiquitination, and they may be circular, with or without branching, generally as a result of posttranslation events, including natural processing event and events brought about by human manipulation which do not occur naturally. Circular, branched and branched circular polypeptides may be synthesized by non-translation natural process and by entirely synthetic methods, as well. Modifications can occur anywhere in a polypeptide, including the peptide backbone, the amino acid side-chains and the amino or carboxyl termini. In fact, blockage of the amino or carboxyl group in a polypeptide, or both, by a covalent modification, is common in naturally occurring and synthetic polypeptides and such modifications may be present in polypeptides of the present invention, as well. For instance, the amino terminal residue of polypeptides made in E. coli, prior to proteolytic processing, almost invariably will be N-formylmethionine.

[0265] Useful post-synthetic (and post-translational) modifications include conjugation to detectable labels, such as fluorophores. A wide variety of amine-reactive and thiol-reactive fluorophore derivatives have been synthesized that react under nondenaturing conditions with N-terminal amino groups and epsilon amino groups of lysine residues, on the one hand, and with free thiol groups of cysteine residues, on the other.

[0266] Kits are available commercially that permit conjugation of proteins to a variety of amine-reactive or thiol-reactive fluorophores: Molecular Probes, Inc. (Eugene, Oreg., USA), e.g., offers kits for conjugating proteins to Alexa Fluor 350, Alexa Fluor 430, Fluorescein-EX, Alexa Fluor 488, Oregon Green 488, Alexa Fluor 532, Alexa Fluor 546, Alexa Fluor 546, Alexa Fluor 568, Alexa Fluor 594, and Texas Red-X.

[0267] A wide variety of other amine-reactive and thiol-reactive fluorophores are available commercially (Molecular Probes, Inc., Eugene, Oreg., USA), including Alexa Fluor® 350, Alexa Fluor® 488, Alexa Fluor® 532, Alexa Fluor® 546, Alexa Fluor® 568, Alexa Fluor® 594, Alexa Fluor® 647 (monoclonal antibody labeling kits available from Molecular Probes, Inc., Eugene, Oreg., USA), BODIPY dyes, such as BODIPY 493/503, BODIPY FL, BODIPY R6G, BODIPY 530/550, BODIPY TMR, BODIPY 558/568, BODIPY 558/568, BODIPY 564/570, BODIPY 576/589, BODIPY 581/591, BODIPY TR, BODIPY 630/650, BODIPY 650/665, Cascade Blue, Cascade Yellow, Dansyl, lissamine rhodamine B, Marina Blue, Oregon Green 488, Oregon Green 514, Pacific Blue, rhodamine 6G, rhodamine green, rhodamine red, tetramethylrhodamine, Texas Red (available from Molecular Probes, Inc., Eugene, Oreg., USA).

[0268] The polypeptides of the present invention can also be conjugated to fluorophores, other proteins, and other macromolecules, using bifunctional linking reagents. Common homobifunctional reagents include, e.g., APG, AEDP, BASED, BMB, BMDB, BMH, BMOE, BM[PEO]3, BM[PEO]4, BS3, BSOCOES, DFDNB, DMA, DMP, DMS, DPDPB, DSG, DSP (Lomant's Reagent), DSS, DST, DTBP, DTME, DTSSP, EGS, HBVS, Sulfo-BSOCOES, Sulfo-DST, Sulfo-EGS (all available from Pierce, Rockford, Ill., USA); common heterobifunctional cross-linkers include ABH, AMAS, ANB-NOS, APDP, ASBA, BMPA, BMPH, BMPS, EDC, EMCA, EMCH, EMCS, KMUA, KMUH, GMBS, LC-SMCC, LC-SPDP, MBS, M2C2H, MPBH, MSA, NHS-ASA, PDPH, PMPI, SADP, SAED, SAND, SANPAH, SASD, SATP, SBAP, SFAD, SIA, SIAB, SMCC, SMPB, SMPH, SMPT, SPDP, Sulfo-EMCS, Sulfo-GMBS, Sulfo-HSAB, Sulfo-KMUS, Sulfo-LC-SPDP, Sulfo-MBS, Sulfo-NHS-LC-ASA, Sulfo-SADP, Sulfo-SANPAH, Sulfo-SIAB, Sulfo-SMCC, Sulfo-SMPB, Sulfo-LC-SMPT, SVSB, TFCS (all available Pierce, Rockford, Ill., USA).

[0269] Polypeptides of the present invention, including full length polypeptides, fragments and fusion proteins, can be conjugated, using such cross-linking reagents, to fluorophores that are not amine- or thiol-reactive. Other labels that usefully can be conjugated to polypeptides of the present invention include radioactive labels, echosonographic contrast reagents, and MRI contrast agents.

[0270] Polypeptides of the present invention, including full length polypeptide, fragments and fusion proteins, can also usefully be conjugated using cross-linking agents to carrier proteins, such as KLH, bovine thyroglobulin, and even bovine serum albumin (BSA), to increase immunogenicity for raising anti-OSP antibodies.

[0271] Polypeptides of the present invention, including full length polypeptide, fragments and fusion proteins, can also usefully be conjugated to polyethylene glycol (PEG); PEGylation increases the serum half life of proteins administered intravenously for replacement therapy. Delgado et al., Crit. Rev. Ther. Drug Carrier Syst. 9(3-4): 249-304 (1992); Scott et al., Curr. Pharm. Des. 4(6): 423-38 (1998); DeSantis et al., Curr. Opin. Biotechnol. 10(4): 324-30 (1999). PEG monomers can be attached to the protein directly or through a linker, with PEGylation using PEG monomers activated with tresyl chloride (2,2,2-trifluoroethanesulphonyl chloride) permitting direct attachment under mild conditions.

[0272] Polypeptides of the present invention are also inclusive of analogs of a polypeptide encoded by a nucleic acid molecule according to the instant invention. In a preferred embodiment, this polypeptide is a OSP. In a more preferred embodiment, this polypeptide is derived from a polypeptide having part or all of the amino acid sequence of SEQ ID NO: 101-240. Also preferred is an analog polypeptide comprising one or more substitutions of non-natural amino acids or non-native inter-residue bonds compared to the naturally occurring polypeptide. In one embodiment, the analog is structurally similar to a OSP, but one or more peptide linkages is replaced by a linkage selected from the group consisting of —CH₂NH—, —CH₂S—, —CH₂—CH₂—, —CH═CH-(cis and trans), —COCH₂—, —CH(OH)CH₂— and —CH₂SO—. In another embodiment, the analog comprises substitution of one or more amino acids of a OSP with a D-amino acid of the same type or other non-natural amino acid in order to generate more stable peptides. D-amino acids can readily be incorporated during chemical peptide synthesis: peptides assembled from D-amino acids are more resistant to proteolytic attack; incorporation of D-amino acids can also be used to confer specific three-dimensional conformations on the peptide. Other amino acid analogues commonly added during chemical synthesis include omithine, norleucine, phosphorylated amino acids (typically phosphoserine, phosphothreonine, phosphotyrosine), L-malonyltyrosine, a non-hydrolyzable analog of phosphotyrosine (see, e.g., Kole et al., Biochem. Biophys. Res. Com. 209: 817-821 (1995)), and various halogenated phenylalanine derivatives.

[0273] Non-natural amino acids can be incorporated during solid phase chemical synthesis or by recombinant techniques, although the former is typically more common. Solid phase chemical synthesis of peptides is well established in the art. Procedures are described, inter alia, in Chan et al. (eds.), Fmoc Solid Phase Peptide Synthesis: A Practical Approach (Practical Approach Series), Oxford Univ. Press (March 2000); Jones, Amino Acid and Peptide Synthesis (Oxford Chemistry Primers, No 7), Oxford Univ. Press (1992); and Bodanszky, Principles of Peptide Synthesis (Springer Laboratory), Springer Verlag (1993).

[0274] Amino acid analogues having detectable labels are also usefully incorporated during synthesis to provide derivatives and analogs. Biotin, for example can be added using biotinoyl-(9-fluorenylmethoxycarbonyl)-L-lysine (FMOC biocytin) (Molecular Probes, Eugene, Oreg., USA). Biotin can also be added enzymatically by incorporation into a fusion protein of a E. coli BirA substrate peptide. The FMOC and tBOC derivatives of dabcyl-L-lysine (Molecular Probes, Inc., Eugene, Oreg., USA) can be used to incorporate the dabcyl chromophore at selected sites in the peptide sequence during synthesis. The aminonaphthalene derivative EDANS, the most common fluorophore for pairing with the dabcyl quencher in fluorescence resonance energy transfer (FRET) systems, can be introduced during automated synthesis of peptides by using EDANS-FMOC-L-glutamic acid or the corresponding tBOC derivative (both from Molecular Probes, Inc., Eugene, Oreg., USA). Tetramethylrhodamine fluorophores can be incorporated during automated FMOC synthesis of peptides using (FMOC)-TMR-L-lysine (Molecular Probes, Inc. Eugene, Oreg., USA).

[0275] Other useful amino acid analogues that can be incorporated during chemical synthesis include aspartic acid, glutamic acid, lysine, and tyrosine analogues having allyl side-chain protection (Applied Biosystems, Inc., Foster City, Calif., USA); the allyl side chain permits synthesis of cyclic, branched-chain, sulfonated, glycosylated, and phosphorylated peptides.

[0276] A large number of other FMOC-protected non-natural amino acid analogues capable of incorporation during chemical synthesis are available commercially, including, e.g., Fmoc-2-aminobicyclo[2.2.1]heptane-2-carboxylic acid, Fmoc-3-endo-aminobicyclo[2.2.1]heptane-2-endo-carboxylic acid, Fmoc-3-exo-aminobicyclo[2.2.1]heptane-2-exo-carboxylic acid, Fmoc-3-endo-amino-bicyclo[2.2.1]hept-5-ene-2-endo-carboxylic acid, Fmoc-3-exo-amino-bicyclo[2.2.1]hept-5-ene-2-exo-carboxylic acid, Fmoc-cis-2-amino-1-cyclohexanecarboxylic acid, Fmoc-trans-2-amino-1-cyclohexanecarboxylic acid, Fmoc-1-amino-1-cyclopentanecarboxylic acid, Fmoc-cis-2-amino-1-cyclopentanecarboxylic acid, Fmoc-1-amino-1-cyclopropanecarboxylic acid, Fmoc-D-2-amino-4-(ethylthio)butyric acid, Fmoc-L-2-amino-4-(ethylthio)butyric acid, Fmoc-L-buthionine, Fmoc-S-methyl-L-Cysteine, Fmoc-2-aminobenzoic acid (anthranillic acid), Fmoc-3-aminobenzoic acid, Fmoc-4-aminobenzoic acid, Fmoc-2-aminobenzophenone-2′-carboxylic acid, Fmoc-N-(4-aminobenzoyl)-β-alanine, Fmoc-2-amino-4,5-dimethoxybenzoic acid, Fmoc-4-aminohippuric acid, Fmoc-2-amino-3-hydroxybenzoic acid, Fmoc-2-amino-5-hydroxybenzoic acid, Fmoc-3-amino-4-hydroxybenzoic acid, Fmoc-4-amino-3-hydroxybenzoic acid, Fmoc-4-amino-2-hydroxybenzoic acid, Fmoc-5-amino-2-hydroxybenzoic acid, Fmoc-2-amino-3-methoxybenzoic acid, Fmoc-4-amino-3-methoxybenzoic acid, Fmoc-2-amino-3-methylbenzoic acid, Fmoc-2-amino-5-methylbenzoic acid, Fmoc-2-amino-6-methylbenzoic acid, Fmoc-3-amino-2-methylbenzoic acid, Fmoc-3-amino-4-methylbenzoic acid, Fmoc-4-amino-3-methylbenzoic acid, Fmoc-3-amino-2-naphtoic acid, Fmoc-D,L-3-amino-3-phenylpropionic acid, Fmoc-L-Methyldopa, Fmoc-2-amino-4,6-dimethyl-3-pyridinecarboxylic acid, Fmoc-D,L-amino-2-thiophenacetic acid, Fmoc-4-(carboxymethyl)piperazine, Fmoc-4-carboxypiperazine, Fmoc-4-(carboxymethyl)homopiperazine, Fmoc-4-phenyl-4-piperidinecarboxylic acid, Fmoc-L-1,2,3,4-tetrahydronorharman-3-carboxylic acid, Fmoc-L-thiazolidine-4-carboxylic acid, all available from The Peptide Laboratory (Richmond, Calif., USA).

[0277] Non-natural residues can also be added biosynthetically by engineering a suppressor tRNA, typically one that recognizes the UAG stop codon, by chemical aminoacylation with the desired unnatural amino acid. Conventional site-directed mutagenesis is used to introduce the chosen stop codon UAG at the site of interest in the protein gene. When the acylated suppressor tRNA and the mutant gene are combined in an in vitro transcription/translation system, the unnatural amino acid is incorporated in response to the UAG codon to give a protein containing that amino acid at the specified position. Liu et al., Proc. Natl Acad. Sci. USA 96(9): 4780-5 (1999); Wang et al., Science 292(5516): 498-500 (2001).

[0278] Fusion Proteins

[0279] Another aspect of the present invention relates to the fusion of a polypeptide of the present invention to heterologous polypeptides. In a preferred embodiment, the polypeptide of the present invention is a OSP. In a more preferred embodiment, the polypeptide of the present invention that is fused to a heterologous polypeptide comprises part or all of the amino acid sequence of SEQ ID NO: 101-240, or is a mutein, homologous polypeptide, analog or derivative thereof. In an even more preferred embodiment, the fusion protein is encoded by a nucleic acid molecule comprising all or part of the nucleic acid sequence of SEQ ID NO: 1-100, or comprises all or part of a nucleic acid sequence that selectively hybridizes or is homologous to a nucleic acid molecule comprising a nucleic acid sequence of SEQ ID NO: 1-100.

[0280] The fusion proteins of the present invention will include at least one fragment of a polypeptide of the present invention, which fragment is at least 6, typically at least 8, often at least 15, and usefully at least 16, 17, 18, 19, or 20 amino acids long. The fragment of the polypeptide of the present to be included in the fusion can usefully be at least 25 amino acids long, at least 50 amino acids long, and can be at least 75, 100, or even 150 amino acids long. Fusions that include the entirety of a polypeptide of the present invention have particular utility.

[0281] The heterologous polypeptide included within the fusion protein of the present invention is at least 6 amino acids in length, often at least 8 amino acids in length, and preferably at least 15, 20, or 25 amino acids in length. Fusions that include larger polypeptides, such as the IgG Fc region, and even entire proteins (such as GFP chromophore-containing proteins) are particularly useful.

[0282] As described above in the description of vectors and expression vectors of the present invention, which discussion is incorporated here by reference in its entirety, heterologous polypeptides to be included in the fusion proteins of the present invention can usefully include those designed to facilitate purification and/or visualization of recombinantly-expressed proteins. See, e.g., Ausubel, Chapter 16, (1992), supra. Although purification tags can also be incorporated into fusions that are chemically synthesized, chemical synthesis typically provides sufficient purity that further purification by HPLC suffices; however, visualization tags as above described retain their utility even when the protein is produced by chemical synthesis, and when so included render the fusion proteins of the present invention useful as directly detectable markers of the presence of a polypeptide of the invention.

[0283] As also discussed above, heterologous polypeptides to be included in the fusion proteins of the present invention can usefully include those that facilitate secretion of recombinantly expressed proteins into the periplasmic space or extracellular milieu for prokaryotic hosts or into the culture medium for eukaryotic cells through incorporation of secretion signals and/or leader sequences. For example, a His⁶ tagged protein can be purified on a Ni affinity column and a GST fusion protein can be purified on a glutathione affinity column. Similarly, a fusion protein comprising the Fc domain of IgG can be purified on a Protein A or Protein G column and a fusion protein comprising an epitope tag such as myc can be purified using an immunoaffinity column containing an anti-c-myc antibody. It is preferable that the epitope tag be separated from the protein encoded by the essential gene by an enzymatic cleavage site that can be cleaved after purification. See also the discussion of nucleic acid molecules encoding fusion proteins that may be expressed on the surface of a cell.

[0284] Other useful fusion proteins of the present invention include those that permit use of the polypeptide of the present invention as bait in a yeast two-hybrid system. See Bartel et al. (eds.), The Yeast Two-Hybrid System, Oxford University Press (1997); Zhu et al., Yeast Hybrid Technologies, Eaton Publishing (2000); Fields et al., Trends Genet. 10(8): 286-92 (1994); Mendelsohn et al., Curr. Opin. Biotechnol. 5(5): 482-6 (1994); Luban et al., Curr. Opin. Biotechnol. 6(1): 59-64 (1995); Allen et al., Trends Biochem. Sci. 20(12): 511-6 (1995); Drees, Curr. Opin. Chem. Biol. 3(1): 64-70 (1999); Topcu et al., Pharm. Res. 17(9): 1049-55 (2000); Fashena et al., Gene 250(1-2): 1-14 (2000); Colas et al., Nature 380, 548-550 (1996); Norman, T. et al., Science 285, 591-595 (1999); Fabbrizio et al., Oncogene 18, 4357-4363 (1999); Xu et al., Proc Natl Acad Sci USA. 94, 12473-12478 (1997); Yang, et al., Nuc. Acids Res. 23, 1152-1156 (1995); Kolonin et al., Proc Natl Acad Sci USA 95, 14266-14271 (1998); Cohen et al., Proc Natl Acad Sci USA 95, 14272-14277 (1998); Uetz, et al. Nature 403, 623-627(2000); Ito, et al., Proc Natl Acad Sci USA 98,4569-4574(2001). Typically, such fusion is to either E. coli LexA or yeast GAL4 DNA binding domains. Related bait plasmids are available that express the bait fused to a nuclear localization signal.

[0285] Other useful fusion proteins include those that permit display of the encoded polypeptide on the surface of a phage or cell, fusions to intrinsically fluorescent proteins, such as green fluorescent protein (GFP), and fusions to the IgG Fc region, as described above.

[0286] The polypeptides of the present invention can also usefully be fused to protein toxins, such as Pseudomonas exotoxin A, diphtheria toxin, shiga toxin A, anthrax toxin lethal factor, ricin, in order to effect ablation of cells that bind or take up the proteins of the present invention.

[0287] Fusion partners include, inter alia, myc, hemagglutinin (HA), GST, immunoglobulins, β-galactosidase, biotin trpE, protein A, β-lactamase, α-amylase, maltose binding protein, alcohol dehydrogenase, polyhistidine (for example, six histidine at the amino and/or carboxyl terminus of the polypeptide), lacZ, green fluorescent protein (GFP), yeast ct mating factor, GAL4 transcription activation or DNA binding domain, luciferase, and serum proteins such as ovalbumin, albumin and the constant domain of IgG. See, e.g., Ausubel (1992), supra and Ausubel (1999), supra. Fusion proteins may also contain sites for specific enzymatic cleavage, such as a site that is recognized by enzymes such as Factor XIII, trypsin, pepsin, or any other enzyme known in the art. Fusion proteins will typically be made by either recombinant nucleic acid methods, as described above, chemically synthesized using techniques well known in the art (e.g., a Merrifield synthesis), or produced by chemical cross-linking.

[0288] Another advantage of fusion proteins is that the epitope tag can be used to bind the fusion protein to a plate or column through an affinity linkage for screening binding proteins or other molecules that bind to the OSP.

[0289] As further described below, the polypeptides of the present invention can readily be used as specific immunogens to raise antibodies that specifically recognize polypeptides of the present invention including OSPs and their allelic variants and homologues. The antibodies, in turn, can be used, inter alia, specifically to assay for the polypeptides of the present invention, particularly OSPs, e.g. by ELISA for detection of protein fluid samples, such as serum, by immunohistochemistry or laser scanning cytometry, for detection of protein in tissue samples, or by flow cytometry, for detection of intracellular protein in cell suspensions, for specific antibody-mediated isolation and/or purification of OSPs, as for example by immunoprecipitation, and for use as specific agonists or antagonists of OSPs.

[0290] One may determine whether polypeptides of the present invention including OSPs, muteins, homologous proteins or allelic variants or fusion proteins of the present invention are functional by methods known in the art. For instance, residues that are tolerant of change while retaining function can be identified by altering the polypeptide at known residues using methods known in the art, such as alanine scanning mutagenesis, Cunningham et al., Science 244(4908): 1081-5 (1989); transposon linker scanning mutagenesis, Chen et al., Gene 263(1-2): 39-48 (2001); combinations of homolog- and alanine-scanning mutagenesis, Jin et al., J. Mol. Biol. 226(3): 851-65 (1992); combinatorial alanine scanning, Weiss et al., Proc. Natl. Acad. Sci USA 97(16): 8950-4 (2000), followed by functional assay. Transposon linker scanning kits are available commercially (New England Biolabs, Beverly, Mass., USA, catalog. no. E7-102S; EZ::TN™ In-Frame Linker Insertion Kit, catalogue no. EZI04KN, (Epicentre Technologies Corporation, Madison, Wis., USA).

[0291] Purification of the polypeptides or fusion proteins of the present invention is well known and within the skill of one having ordinary skill in the art. See, e.g., Scopes, Protein Purification, 2d ed. (1987). Purification of recombinantly expressed polypeptides is described above. Purification of chemically-synthesized peptides can readily be effected, e.g., by HPLC.

[0292] Accordingly, it is an aspect of the present invention to provide the isolated polypeptides or fusion proteins of the present invention in pure or substantially pure form in the presence of absence of a stabilizing agent. Stabilizing agents include both proteinaceous and non-proteinaceous material and are well known in the art. Stabilizing agents, such as albumin and polyethylene glycol (PEG) are known and are commercially available.

[0293] Although high levels of purity are preferred when the isolated polypeptide or fusion protein of the present invention are used as therapeutic agents, such as in vaccines and replacement therapy, the isolated polypeptides of the present invention are also useful at lower purity. For example, partially purified polypeptides of the present invention can be used as immunogens to raise antibodies in laboratory animals.

[0294] In a preferred embodiment, the purified and substantially purified polypeptides of the present invention are in compositions that lack detectable ampholytes, acrylamide monomers, bis-acrylamide monomers, and polyacrylamide.

[0295] The polypeptides or fusion proteins of the present invention can usefully be attached to a substrate. The substrate can be porous or solid, planar or non-planar; the bond can be covalent or noncovalent. For example, the peptides of the invention may be stabilized by covalent linkage to albumin. See, U.S. Pat. No. 5,876,969, the contents of which are hereby incorporated in its entirety.

[0296] For example, the polypeptides or fusion proteins of the present invention can usefully be bound to a porous substrate, commonly a membrane, typically comprising nitrocellulose, polyvinylidene fluoride (PVDF), or cationically derivatized, hydrophilic PVDF; so bound, the polypeptides or fusion proteins of the present invention can be used to detect and quantify antibodies, e.g. in serum, that bind specifically to the immobilized polypeptide or fusion protein of the present invention.

[0297] As another example, the polypeptides or fusion proteins of the present invention can usefully be bound to a substantially nonporous substrate, such as plastic, to detect and quantify antibodies, e.g. in serum, that bind specifically to the immobilized protein of the present invention. Such plastics include polymethylacrylic, polyethylene, polypropylene, polyacrylate, polymethylmethacrylate, polyvinylchloride, polytetrafluoroethylene, polystyrene, polycarbonate, polyacetal, polysulfone, celluloseacetate, cellulosenitrate, nitrocellulose, or mixtures thereof, when the assay is performed in a standard microtiter dish, the plastic is typically polystyrene.

[0298] The polypeptides and fusion proteins of the present invention can also be attached to a substrate suitable for use as a surface enhanced laser desorption ionization source; so attached, the polypeptide or fusion protein of the present invention is useful for binding and then detecting secondary proteins that bind with sufficient affinity or avidity to the surface-bound polypeptide or fusion protein to indicate biologic interaction there between. The polypeptides or fusion proteins of the present invention can also be attached to a substrate suitable for use in surface plasmon resonance detection; so attached, the polypeptide or fusion protein of the present invention is useful for binding and then detecting secondary proteins that bind with sufficient affinity or avidity to the surface-bound polypeptide or fusion protein to indicate biological interaction there between.

Alternative Transcripts

[0299] In another aspect, the present invention provides splice variants of genes and proteins encoded thereby. The identification of a novel splice variant which encodes an amino acid sequence with a novel region can be targeted for the generation of reagents for use in detection and/or treatment of cancer. The novel amino acid sequence may lead to a unique protein structure, protein subcellular localization, biochemical processing or function of the splice variant. This information can be used to directly or indirectly facilitate the generation of additional or novel therapeutics or diagnostics. The nucleotide sequence in this novel splice variant can be used as a nucleic acid probe for the diagnosis and/or treatment of cancer.

[0300] Specifically, the newly identified sequences may enable the production of new antibodies or compounds directed against the novel region for use as a therapeutic or diagnostic. Alternatively, the newly identified sequences may alter the biochemical or biological properties of the encoded protein in such a way as to enable the generation of improved or different therapeutics targeting this protein.

Antibodies

[0301] In another aspect, the invention provides antibodies, including fragments and derivatives thereof, that bind specifically to polypeptides encoded by the nucleic acid molecules of the invention. In a preferred embodiment, the antibodies are specific for a polypeptide that is a OSP, or a fragment, mutein, derivative, analog or fusion protein thereof. In a more preferred embodiment, the antibodies are specific for a polypeptide that comprises SEQ ID NO: 101-240, or a fragment, mutein, derivative, analog or fusion protein thereof.

[0302] The antibodies of the present invention can be specific for linear epitopes, discontinuous epitopes, or conformational epitopes of such proteins or protein fragments, either as present on the protein in its native conformation or, in some cases, as present on the proteins as denatured, as, e.g., by solubilization in SDS. New epitopes may be also due to a difference in post translational modifications (PTMs) in disease versus normal tissue. For example, a particular site on a OSP may be glycosylated in cancerous cells, but not glycosylated in normal cells or visa versa. In addition, alternative splice forms of a OSP may be indicative of cancer. Differential degradation of the C or N-terminus of a OSP may also be a marker or target for anticancer therapy. For example, an OSP may be N-terminal degraded in cancer cells exposing new epitopes to which antibodies may selectively bind for diagnostic or therapeutic uses.

[0303] As is well known in the art, the degree to which an antibody can discriminate as among molecular species in a mixture will depend, in part, upon the conformational relatedness of the species in the mixture; typically, the antibodies of the present invention will discriminate over adventitious binding to non-OSP polypeptides by at least two-fold, more typically by at least 5-fold, typically by more than 10-fold, 25-fold, 50-fold, 75-fold, and often by more than 100-fold, and on occasion by more than 500-fold or 1000-fold. When used to detect the proteins or protein fragments of the present invention, the antibody of the present invention is sufficiently specific when it can be used to determine the presence of the polypeptide of the present invention in samples derived from human ovarian.

[0304] Typically, the affinity or avidity of an antibody (or antibody multimer, as in the case of an IgM pentamer) of the present invention for a protein or protein fragment of the present invention will be at least about 1×10⁻⁶ molar (M), typically at least about 5×10⁻⁷ M, 1×10⁻⁷ M, with affinities and avidities of at least 1×10⁻⁸ M, 5×10⁻⁹ M, 1×10⁻¹⁰ M and up to 1×10⁻¹³ M proving especially useful.

[0305] The antibodies of the present invention can be naturally occurring forms, such as IgG, IgM, IgD, IgE, IgY, and IgA, from any avian, reptilian, or mammalian species.

[0306] Human antibodies can, but will infrequently, be drawn directly from human donors or human cells. In such case, antibodies to the polypeptides of the present invention will typically have resulted from fortuitous immunization, such as autoimmune immunization, with the polypeptide of the present invention. Such antibodies will typically, but will not invariably, be polyclonal. In addition, individual polyclonal antibodies may be isolated and cloned to generate monoclonals.

[0307] Human antibodies are more frequently obtained using transgenic animals that express human immunoglobulin genes, which transgenic animals can be affirmatively immunized with the protein immunogen of the present invention. Human Ig-transgenic mice capable of producing human antibodies and methods of producing human antibodies therefrom upon specific immunization are described, inter alia, in U.S. Pat. Nos. 6,162,963; 6,150,584; 6,114,598; 6,075,181; 5,939,598; 5,877,397; 5,874,299; 5,814,318; 5,789,650; 5,770,429; 5,661,016; 5,633,425; 5,625,126; 5,569,825; 5,545,807; 5,545,806, and 5,591,669, the disclosures of which are incorporated herein by reference in their entireties. Such antibodies are typically monoclonal, and are typically produced using techniques developed for production of murine antibodies.

[0308] Human antibodies are particularly useful, and often preferred, when the antibodies of the present invention are to be administered to human beings as in vivo diagnostic or therapeutic agents, since recipient immune response to the administered antibody will often be substantially less than that occasioned by administration of an antibody derived from another species, such as mouse.

[0309] IgG, IgM, IgD, IgE, IgY, and IgA antibodies of the present invention are also usefully obtained from other species, including mammals such as rodents (typically mouse, but also rat, guinea pig, and hamster), lagomorphs (typically rabbits), and also larger mammals, such as sheep, goats, cows, and horses; or egg laying birds or reptiles such as chickens or alligators. In such cases, as with the transgenic human-antibody-producing non-human mammals, fortuitous immunization is not required, and the non-human mammal is typically affirmatively immunized, according to standard immunization protocols, with the polypeptide of the present invention. One form of avian antibodies may be generated using techniques described in WO 00/29444, published 25 May 2000.

[0310] As discussed above, virtually all fragments of 8 or more contiguous amino acids of a polypeptide of the present invention can be used effectively as immunogens when conjugated to a carrier, typically a protein such as bovine thyroglobulin, keyhole limpet hemocyanin, or bovine serum albumin, conveniently using a bifunctional linker such as those described elsewhere above, which discussion is incorporated by reference here.

[0311] Immunogenicity can also be conferred by fusion of the polypeptide of the present invention to other moieties. For example, polypeptides of the present invention can be produced by solid phase synthesis on a branched polylysine core matrix; these multiple antigenic peptides (MAPs) provide high purity, increased avidity, accurate chemical definition and improved safety in vaccine development. Tam et al., Proc. Natl. Acad. Sci. USA 85: 5409-5413 (1988); Posnett et al., J. Biol. Chem. 263: 1719-1725 (1988).

[0312] Protocols for immunizing non-human mammals or avian species are well-established in the art. See Harlow et al. (eds.), Using Antibodies: A Laboratory Manual, Cold Spring Harbor Laboratory (1998); Coligan et al. (eds.), Current Protocols in Immunology, John Wiley & Sons, Inc. (2001); Zola, Monoclonal Antibodies: Preparation and Use of Monoclonal Antibodies and Engineered Antibody Derivatives (Basics: From Background to Bench), Springer Verlag (2000); Gross M, Speck J.Dtsch. Tierarztl. Wochenschr. 103: 417-422 (1996). Immunization protocols often include multiple immunizations, either with or without adjuvants such as Freund's complete adjuvant and Freund's incomplete adjuvant, and may include naked DNA immunization (Moss, Semin. Immunol. 2: 317-327 (1990).

[0313] Antibodies from non-human mammals and avian species can be polyclonal or monoclonal, with polyclonal antibodies having certain advantages in immunohistochemical detection of the polypeptides of the present invention and monoclonal antibodies having advantages in identifying and distinguishing particular epitopes of the polypeptides of the present invention. Antibodies from avian species may have particular advantage in detection of the polypeptides of the present invention, in human serum or tissues (Vikinge et al., Biosens. Bioelectron. 13: 1257-1262 (1998). Following immunization, the antibodies of the present invention can be obtained using any art-accepted technique. Such techniques are well known in the art and are described in detail in references such as Coligan, supra; Zola, supra; Howard et al. (eds.), Basic Methods in Antibody Production and Characterization, CRC Press (2000); Harlow, supra; Davis (ed.), Monoclonal Antibody Protocols, Vol. 45, Humana Press (1995); Delves (ed.), Antibody Production: Essential Techniques, John Wiley & Son Ltd (1997); and Kenney, Antibody Solution: An Antibody Methods Manual, Chapman & Hall (1997).

[0314] Briefly, such techniques include, inter alia, production of monoclonal antibodies by hybridomas and expression of antibodies or fragments or derivatives thereof from host cells engineered to express immunoglobulin genes or fragments thereof. These two methods of production are not mutually exclusive: genes encoding antibodies specific for the polypeptides of the present invention can be cloned from hybridomas and thereafter expressed in other host cells. Nor need the two necessarily be performed together: e.g., genes encoding antibodies specific for the polypeptides of the present invention can be cloned directly from B cells known to be specific for the desired protein, as further described in U.S. Pat. No. 5,627,052, the disclosure of which is incorporated herein by reference in its entirety, or from antibody-displaying phage.

[0315] Recombinant expression in host cells is particularly useful when fragments or derivatives of the antibodies of the present invention are desired.

[0316] Host cells for recombinant antibody production of whole antibodies, antibody fragments, or antibody derivatives can be prokaryotic or eukaryotic.

[0317] Prokaryotic hosts are particularly useful for producing phage displayed antibodies of the present invention.

[0318] The technology of phage-displayed antibodies, in which antibody variable region fragments are fused, for example, to the gene III protein (pIII) or gene VIII protein (pVIII) for display on the surface of filamentous phage, such as M13, is by now well-established. See, e.g., Sidhu, Curr. Opin. Biotechnol. 11(6): 610-6 (2000); Griffiths et al., Curr. Opin. Biotechnol. 9(1): 102-8 (1998); Hoogenboom et al., Immunotechnology, 4(1): 1-20 (1998); Rader et al., Current Opinion in Biotechnology 8: 503-508 (1997); Aujame et al., Human Antibodies 8: 155-168 (1997); Hoogenboom, Trends in Biotechnol. 15: 62-70 (1997); de Kruif et al., 17: 453-455 (1996); Barbas et al., Trends in Biotechnol. 14: 230-234 (1996); Winter et al., Ann. Rev. Immunol. 433-455 (1994). Techniques and protocols required to generate, propagate, screen (pan), and use the antibody fragments from such libraries have recently been compiled. See, e.g., Barbas (2001), supra; Kay, supra; and Abelson, supra.

[0319] Typically, phage-displayed antibody fragments are scFv fragments or Fab fragments; when desired, full length antibodies can be produced by cloning the variable regions from the displaying phage into a complete antibody and expressing the full length antibody in a further prokaryotic or a eukaryotic host cell. Eukaryotic cells are also useful for expression of the antibodies, antibody fragments, and antibody derivatives of the present invention. For example, antibody fragments of the present invention can be produced in Pichia pastoris and in Saccharomyces cerevisiae. See, e.g., Takahashi et al., Biosci. Biotechnol. Biochem. 64(10): 2138-44 (2000); Freyre et al., J. Biotechnol. 76(2-3): 1 57-63 (2000); Fischer et al., Biotechnol. Appl. Biochem. 30 (Pt 2): 117-20 (1999); Pennell et al., Res. Immunol. 149(6): 599-603 (1998); Eldin et al., J. Immunol. Methods. 201(1): 67-75 (1997); Frenken et al., Res. Immunol. 149(6): 589-99 (1998); and Shusta et al., Nature Biotechnol. 16(8): 773-7 (1998).

[0320] Antibodies, including antibody fragments and derivatives, of the present invention can also be produced in insect cells. See, e.g., Li et al., Protein Expr. Purif: 21(1): 121-8 (2001); Ailor et al., Biotechnol. Bioeng. 58(2-3): 196-203 (1998); Hsu et al., Biotechnol. Prog. 13(1): 96-104 (1997); Edelman et al., Immunology 91(1): 13-9 (1997); and Nesbit et al., J. Immunol. Methods 151(1-2): 201-8 (1992).

[0321] Antibodies and fragments and derivatives thereof of the present invention can also be produced in plant cells, particularly maize or tobacco, Giddings et al., Nature Biotechnol. 18(11): 1151-5 (2000); Gavilondo et al., Biotechniques 29(1): 128-38 (2000); Fischer et al., J. Biol. Regul. Homeost. Agents 14(2): 83-92 (2000); Fischer et al., Biotechnol. Appl. Biochem. 30 (Pt 2): 113-6 (1999); Fischer et al., Biol. Chem. 380(7-8): 825-39 (1999); Russell, Curr. Top. Microbiol. Immunol. 240: 119-38 (1999); and Ma et al., Plant Physiol. 109(2): 341-6 (1995).

[0322] Antibodies, including antibody fragments and derivatives, of the present invention can also be produced in transgenic, non-human, mammalian milk. See, e.g. Pollock et al., J. Immunol Methods. 231: 147-57 (1999); Young et al., Res. Immunol. 149: 609-10 (1998); and Limonta et al., Immunotechnology 1: 107-13 (1995).

[0323] Mammalian cells useful for recombinant expression of antibodies, antibody fragments, and antibody derivatives of the present invention include CHO cells, COS cells, 293 cells, and myeloma cells. Verma et al., J. Immunol. Methods 216(1-2):165-81 (1998) review and compare bacterial, yeast, insect and mammalian expression systems for expression of antibodies. Antibodies of the present invention can also be prepared by cell free translation, as further described in Merk et al., J. Biochem. (Tokyo) 125(2): 328-33 (1999) and Ryabova et al., Nature Biotechnol. 15(1): 79-84 (1997), and in the milk of transgenic animals, as further described in Pollock et al., J. Immunol. Methods 231(1-2): 147-57 (1999).

[0324] The invention further provides antibody fragments that bind specifically to one or more of the polypeptides of the present invention, to one or more of the polypeptides encoded by the isolated nucleic acid molecules of the present invention, or the binding of which can be competitively inhibited by one or more of the polypeptides of the present invention or one or more of the polypeptides encoded by the isolated nucleic acid molecules of the present invention. Among such useful fragments are Fab, Fab′, Fv, F(ab)′₂, and single chain Fv (scFv) fragments. Other useful fragments are described in Hudson, Curr. Opin. Biotechnol. 9(4): 395-402 (1998).

[0325] The present invention also relates to antibody derivatives that bind specifically to one or more of the polypeptides of the present invention, to one or more of the polypeptides encoded by the isolated nucleic acid molecules of the present invention, or the binding of which can be competitively inhibited by one or more of the polypeptides of the present invention or one or more of the polypeptides encoded by the isolated nucleic acid molecules of the present invention.

[0326] Among such useful derivatives are chimeric, primatized, and humanized antibodies; such derivatives are less immunogenic in human beings, and thus are more suitable for in vivo administration, than are unmodified antibodies from non-human mammalian species. Another useful method is PEGylation to increase the serum half life of the antibodies.

[0327] Chimeric antibodies typically include heavy and/or light chain variable regions (including both CDR and framework residues) of immunoglobulins of one species, typically mouse, fused to constant regions of another species, typically human. See, e.g., Morrison et al., Proc. Natl. Acad. Sci USA.81(21): 6851-5 (1984); Sharon et al., Nature 309(5966): 364-7 (1984); Takeda et al., Nature 314(6010): 452-4 (1985); and U.S. Pat. No. 5,807,715 the disclosure of which is incorporated herein by reference in its entirety. Primatized and humanized antibodies typically include heavy and/or light chain CDRs from a murine antibody grafted into a non-human primate or human antibody V region framework, usually further comprising a human constant region, Riechmann et al., Nature 332(6162): 323-7 (1988); Co et al., Nature 351(6326): 501-2 (1991); and U.S. Pat. Nos. 6,054,297; 5,821,337; 5,770,196; 5,766,886; 5,821,123; 5,869,619; 6,180,377; 6,013,256; 5,693,761; and 6,180,370, the disclosures of which are incorporated herein by reference in their entireties. Other useful antibody derivatives of the invention include heteromeric antibody complexes and antibody fusions, such as diabodies (bispecific antibodies), single-chain diabodies, and intrabodies.

[0328] It is contemplated that the nucleic acids encoding the antibodies of the present invention can be operably joined to other nucleic acids forming a recombinant vector for cloning or for expression of the antibodies of the invention. Accordingly, the present invention includes any recombinant vector containing the coding sequences, or part thereof, whether for eukaryotic transduction, transfection or gene therapy. Such vectors may be prepared using conventional molecular biology techniques, known to those with skill in the art, and would comprise DNA encoding sequences for the immunoglobulin V-regions including framework and CDRs or parts thereof, and a suitable promoter either with or without a signal sequence for intracellular transport. Such vectors may be transduced or transfected into eukaryotic cells or used for gene therapy (Marasco et al., Proc. Natl. Acad. Sci. (USA) 90: 7889-7893 (1993); Duan et al., Proc. Natl. Acad. Sci. (USA) 91: 5075-5079 (1994), by conventional techniques, known to those with skill in the art.

[0329] The antibodies of the present invention, including fragments and derivatives thereof, can usefully be labeled. It is, therefore, another aspect of the present invention to provide labeled antibodies that bind specifically to one or more of the polypeptides of the present invention, to one or more of the polypeptides encoded by the isolated nucleic acid molecules of the present invention, or the binding of which can be competitively inhibited by one or more of the polypeptides of the present invention or one or more of the polypeptides encoded by the isolated nucleic acid molecules of the present invention. The choice of label depends, in part, upon the desired use.

[0330] For example, when the antibodies of the present invention are used for immunohistochemical staining of tissue samples, the label can usefully be an enzyme that catalyzes production and local deposition of a detectable product. Enzymes typically conjugated to antibodies to permit their immunohistochemical visualization are well known, and include alkaline phosphatase, β-galactosidase, glucose oxidase, horseradish peroxidase (HRP), and urease. Typical substrates for production and deposition of visually detectable products include o-nitrophenyl-beta-D-galactopyranoside (ONPG); o-phenylenediamine dihydrochloride (OPD); p-nitrophenyl phosphate (PNPP); p-nitrophenyl-beta-D-galactopryanoside (PNPG); 3′,3′-diaminobenzidine (DAB); 3-amino-9-ethylcarbazole (AEC); 4-chloro-1-naphthol (CN); 5-bromo-4-chloro-3-indolyl-phosphate (BCIP); ABTS®; BluoGal; iodonitrotetrazolium (INT); nitroblue tetrazolium chloride (NBT); phenazine methosulfate (PMS); phenolphthalein monophosphate (PMP); tetramethyl benzidine (TMB); tetranitroblue tetrazolium (TNBT); X-Gal; X-Gluc; and X-Glucoside.

[0331] Other substrates can be used to produce products for local deposition that are luminescent. For example, in the presence of hydrogen peroxide (H₂O₂), horseradish peroxidase (HRP) can catalyze the oxidation of cyclic diacylhydrazides, such as luminol. Immediately following the oxidation, the luminol is in an excited state (intermediate reaction product), which decays to the ground state by emitting light. Strong enhancement of the light emission is produced by enhancers, such as phenolic compounds. Advantages include high sensitivity, high resolution, and rapid detection without radioactivity and requiring only small amounts of antibody. See, e.g., Thorpe et al., Methods Enzymol. 133: 331-53 (1986); Kricka et al., J. Immunoassay 17(1): 67-83 (1996); and Lundqvist et al., J. Biolumin. Chemilumin. 10(6): 353-9 (1995). Kits for such enhanced chemiluminescent detection (ECL) are available commercially. The antibodies can also be labeled using colloidal gold.

[0332] As another example, when the antibodies of the present invention are used, e.g., for flow cytometric detection, for scanning laser cytometric detection, or for fluorescent immunoassay, they can usefully be labeled with fluorophores. There are a wide variety of fluorophore labels that can usefully be attached to the antibodies of the present invention. For flow cytometric applications, both for extracellular detection and for intracellular detection, common useful fluorophores can be fluorescein isothiocyanate (FITC), allophycocyanin (APC), R-phycoerythrin (PE), peridinin chlorophyll protein (PerCP), Texas Red, Cy3, Cy5, fluorescence resonance energy tandem fluorophores such as PerCP-Cy5.5, PE-Cy5, PE-Cy5.5, PE-Cy7, PE-Texas Red, and APC-Cy7.

[0333] Other fluorophores include, inter alia, Alexa Fluor® 350, Alexa Fluor® 488, Alexa Fluor® 532, Alexa Fluor® 546, Alexa Fluor® 568, Alexa Fluor® 594, Alexa Fluor® 647 (monoclonal antibody labeling kits available from Molecular Probes, Inc., Eugene, Oreg., USA), BODIPY dyes, such as BODIPY 493/503, BODIPY FL, BODIPY R6G, BODIPY 530/550, BODIPY TMR, BODIPY 558/568, BODIPY 558/568, BODIPY 564/570, BODIPY 576/589, BODIPY 581/591, BODIPY TR, BODIPY 630/650, BODIPY 650/665, Cascade Blue, Cascade Yellow, Dansyl, lissamine rhodamine B, Marina Blue, Oregon Green 488, Oregon Green 514, Pacific Blue, rhodamine 6G, rhodamine green, rhodamine red, tetramethylrhodamine, Texas Red (available from Molecular Probes, Inc., Eugene, Oreg., USA), and Cy2, Cy3, Cy3.5, Cy5, Cy5.5, Cy7, all of which are also useful for fluorescently labeling the antibodies of the present invention. For secondary detection using labeled avidin, streptavidin, captavidin or neutravidin, the antibodies of the present invention can usefully be labeled with biotin.

[0334] When the antibodies of the present invention are used, e.g., for western blotting applications, they can usefully be labeled with radioisotopes, such as ³³P, ³²P, ³⁵S, ³H, and ¹²⁵I. As another example, when the antibodies of the present invention are used for radioimmunotherapy, the label can usefully be ²²⁸Th, ²²⁷Ac, ²²⁵Ac, ²²³Ra, ²¹³Bi, ²¹²Pb, ²¹²Bi, ²¹¹At, ²⁰³Pb, ¹⁹⁴Os, ¹⁸⁸Re, ¹⁸⁶Re, ¹⁵³Sm, ¹⁴⁹Tb , ¹³¹I, ¹²⁵I, ¹¹¹In, ¹⁰⁵Rh, ^{99m}Tc, ⁹⁷Ru, ⁹⁰Y, ⁹⁰Sr, ⁸⁸Y, ⁷²Se, ⁶⁷Cu, or ⁴⁷Sc.

[0335] As another example, when the antibodies of the present invention are to be used for in vivo diagnostic use, they can be rendered detectable by conjugation to MRI contrast agents, such as gadolinium diethylenetriaminepentaacetic acid (DTPA), Lauffer et al., Radiology 207(2): 529-38 (1998), or by radioisotopic labeling.

[0336] As would be understood, use of the labels described above is not restricted to the application as for which they were mentioned.

[0337] The antibodies of the present invention, including fragments and derivatives thereof, can also be conjugated to toxins, in order to target the toxin's ablative action to cells that display and/or express the polypeptides of the present invention. Commonly, the antibody in such immunotoxins is conjugated to Pseudomonas exotoxin A, diphtheria toxin, shiga toxin A, anthrax toxin lethal factor, or ricin. See Hall (ed.), Immunotoxin Methods and Protocols (Methods in Molecular Biology, vol. 166), Humana Press (2000); and Frankel et al. (eds.), Clinical Applications of Immunotoxins, Springer-Verlag (1998).

[0338] The antibodies of the present invention can usefully be attached to a substrate, and it is, therefore, another aspect of the invention to provide antibodies that bind specifically to one or more of the polypeptides of the present invention, to one or more of the polypeptides encoded by the isolated nucleic acid molecules of the present invention, or the binding of which can be competitively inhibited by one or more of the polypeptides of the present invention or one or more of the polypeptides encoded by the isolated nucleic acid molecules of the present invention, attached to a substrate. Substrates can be porous or nonporous, planar or nonplanar. For example, the antibodies of the present invention can usefully be conjugated to filtration media, such as NHS-activated Sepharose or CNBr-activated Sepharose for purposes of immunoaffinity chromatography. For example, the antibodies of the present invention can usefully be attached to paramagnetic microspheres, typically by biotin-streptavidin interaction, which microsphere can then be used for isolation of cells that express or display the polypeptides of the present invention. As another example, the antibodies of the present invention can usefully be attached to the surface of a microtiter plate for ELISA.

[0339] As noted above, the antibodies of the present invention can be produced in prokaryotic and eukaryotic cells. It is, therefore, another aspect of the present invention to provide cells that express the antibodies of the present invention, including hybridoma cells, B cells, plasma cells, and host cells recombinantly modified to express the antibodies of the present invention.

[0340] In yet a further aspect, the present invention provides aptamers evolved to bind specifically to one or more of the OSPs of the present invention or to polypeptides encoded by the OSNAs of the invention.

[0341] In sum, one of skill in the art, provided with the teachings of this invention, has available a variety of methods which may be used to alter the biological properties of the antibodies of this invention including methods which would increase or decrease the stability or half-life, immunogenicity, toxicity, affinity or yield of a given antibody molecule, or to alter it in any other way that may render it more suitable for a particular application.

Transgenic Animals and Cells

[0342] In another aspect, the invention provides transgenic cells and non-human organisms comprising nucleic acid molecules of the invention. In a preferred embodiment, the transgenic cells and non-human organisms comprise a nucleic acid molecule encoding a OSP. In a preferred embodiment, the OSP comprises an amino acid sequence selected from SEQ ID NO: 101-240, or a fragment, mutein, homologous protein or allelic variant thereof. In another preferred embodiment, the transgenic cells and non-human organism comprise a OSNA of the invention, preferably a OSNA comprising a nucleotide sequence selected from the group consisting of SEQ ID NO: 1-100, or a part, substantially similar nucleic acid molecule, allelic variant or hybridizing nucleic acid molecule thereof.

[0343] In another embodiment, the transgenic cells and non-human organisms have a targeted disruption or replacement of the endogenous orthologue of the human OSG. The transgenic cells can be embryonic stem cells or somatic cells. The transgenic non-human organisms can be chimeric, nonchimeric heterozygotes, and nonchimeric homozygotes. Methods of producing transgenic animals are well known in the art. See, e.g., Hogan et al., Manipulating the Mouse Embryo: A Laboratory Manual, 2d ed., Cold Spring Harbor Press (1999); Jackson et al., Mouse Genetics and Transgenics: A Practical Approach, Oxford University Press (2000); and Pinkert, Transgenic Animal Technology: A Laboratory Handbook, Academic Press (1999).

[0344] Any technique known in the art may be used to introduce a nucleic acid molecule of the invention into an animal to produce the founder lines of transgenic animals. Such techniques include, but are not limited to, pronuclear microinjection. (see, e.g., Paterson et al., Appl. Microbiol. Biotechnol. 40: 691-698 (1994); Carver et al., Biotechnology 11: 1263-1270 (1993); Wright et al., Biotechnology 9: 830-834 (1991); and U.S. Pat. No. 4,873,191, herein incorporated by reference in its entirety); retrovirus-mediated gene transfer into germ lines, blastocysts or embryos (see, e.g., Van der Putten et al., Proc. Natl. Acad. Sci., USA 82: 6148-6152 (1985)); gene targeting in embryonic stem cells (see, e.g., Thompson et al., Cell 56: 313-321 (1989)); electroporation of cells or embryos (see, e.g., Lo, 1983, Mol. Cell. Biol. 3: 1803-1814 (1983)); introduction using a gene gun (see, e.g., Ulmer et al., Science 259: 1745-49 (1993); introducing nucleic acid constructs into embryonic pleuripotent stem cells and transferring the stem cells back into the blastocyst; and sperm-mediated gene transfer (see, e.g., Lavitrano et al., Cell 57: 717-723 (1989)).

[0345] Other techniques include, for example, nuclear transfer into enucleated oocytes of nuclei from cultured embryonic, fetal, or adult cells induced to quiescence (see, e.g., Campell et al., Nature 380: 64-66 (1996); Wilmut et al., Nature 385: 810-813 (1997)). The present invention provides for transgenic animals that carry the transgene (i.e., a nucleic acid molecule of the invention) in all their cells, as well as animals which carry the transgene in some, but not all their cells, i.e. e., mosaic animals or chimeric animals.

[0346] The transgene may be integrated as a single transgene or as multiple copies, such as in concatamers, e.g., head-to-head tandems or head-to-tail tandems. The transgene may also be selectively introduced into and activated in a particular cell type by following, e.g., the teaching of Lasko et al. et al., Proc. Natl. Acad. Sci. USA 89: 6232-6236 (1992). The regulatory sequences required for such a cell-type specific activation will depend upon the particular cell type of interest, and will be apparent to those of skill in the art.

[0347] Once transgenic animals have been generated, the expression of the recombinant gene may be assayed utilizing standard techniques. Initial screening may be accomplished by Southern blot analysis or PCR techniques to analyze animal tissues to verify that integration of the transgene has taken place. The level of mRNA expression of the transgene in the tissues of the transgenic animals may also be assessed using techniques which include, but are not limited to, Northern blot analysis of tissue samples obtained from the animal, in situ hybridization analysis, and reverse transcriptase-PCR (RT-PCR). Samples of transgenic gene-expressing tissue may also be evaluated immunocytochemically or immunohistochemically using antibodies specific for the transgene product.

[0348] Once the founder animals are produced, they may be bred, inbred, outbred, or crossbred to produce colonies of the particular animal. Examples of such breeding strategies include, but are not limited to: outbreeding of founder animals with more than one integration site in order to establish separate lines; inbreeding of separate lines in order to produce compound transgenics that express the transgene at higher levels because of the effects of additive expression of each transgene; crossing of heterozygous transgenic animals to produce animals homozygous for a given integration site in order to both augment expression and eliminate the need for screening of animals by DNA analysis; crossing of separate homozygous lines to produce compound heterozygous or homozygous lines; and breeding to place the transgene on a distinct background that is appropriate for an experimental model of interest.

[0349] Transgenic animals of the invention have uses which include, but are not limited to, animal model systems useful in elaborating the biological function of polypeptides of the present invention, studying conditions and/or disorders associated with aberrant expression, and in screening for compounds effective in ameliorating such conditions and/or disorders.

[0350] Methods for creating a transgenic animal with a disruption of a targeted gene are also well known in the art. In general, a vector is designed to comprise some nucleotide sequences homologous to the endogenous targeted gene. The vector is introduced into a cell so that it may integrate, via homologous recombination with chromosomal sequences, into the endogenous gene, thereby disrupting the function of the endogenous gene. The transgene may also be selectively introduced into a particular cell type, thus inactivating the endogenous gene in only that cell type. See, e.g., Gu et al., Science 265: 103-106 (1994). The regulatory sequences required for such a cell-type specific inactivation will depend upon the particular cell type of interest, and will be apparent to those of skill in the art. See, e.g., Smithies et al., Nature 317: 230-234 (1985); Thomas et al., Cell 51: 503-512 (1987); Thompson et al., Cell 5: 313-321 (1989).

[0351] In one embodiment, a mutant, non-functional nucleic acid molecule of the invention (or a completely unrelated DNA sequence) flanked by DNA homologous to the endogenous nucleic acid sequence (either the coding regions or regulatory regions of the gene) can be used, with or without a selectable marker and/or a negative selectable marker, to transfect cells that express polypeptides of the invention in vivo. In another embodiment, techniques known in the art are used to generate knockouts in cells that contain, but do not express the gene of interest. Insertion of the DNA construct, via targeted homologous recombination, results in inactivation of the targeted gene. Such approaches are particularly suited in research and agricultural fields where modifications to embryonic stem cells can be used to generate animal offspring with an inactive targeted gene. See, e.g., Thomas, supra and Thompson, supra. However this approach can be routinely adapted for use in humans provided the recombinant DNA constructs are directly administered or targeted to the required site in vivo using appropriate viral vectors that will be apparent to those of skill in the art.

[0352] In further embodiments of the invention, cells that are genetically engineered to express the polypeptides of the invention, or alternatively, that are genetically engineered not to express the polypeptides of the invention (e.g., knockouts) are administered to a patient in vivo. Such cells may be obtained from an animal or patient or an MHC compatible donor and can include, but are not limited to fibroblasts, bone marrow cells, blood cells (e.g., lymphocytes), adipocytes, muscle cells, endothelial cells etc. The cells are genetically engineered in vitro using recombinant DNA techniques to introduce the coding sequence of polypeptides of the invention into the cells, or alternatively, to disrupt the coding sequence and/or endogenous regulatory sequence associated with the polypeptides of the invention, e.g., by transduction (using viral vectors, and preferably vectors that integrate the transgene into the cell genome) or transfection procedures, including, but not limited to, the use of plasmids, cosmids, YACs, naked DNA, electroporation, liposomes, etc.

[0353] The coding sequence of the polypeptides of the invention can be placed under the control of a strong constitutive or inducible promoter or promoter/enhancer to achieve expression, and preferably secretion, of the polypeptides of the invention. The engineered cells which express and preferably secrete the polypeptides of the invention can be introduced into the patient systemically, e.g., in the circulation, or intraperitoneally.

[0354] Alternatively, the cells can be incorporated into a matrix and implanted in the body, e.g., genetically engineered fibroblasts can be implanted as part of a skin graft; genetically engineered endothelial cells can be implanted as part of a lymphatic or vascular graft. See, e.g., U.S. Pat. Nos. 5,399,349 and 5,460,959, each of which is incorporated by reference herein in its entirety.

[0355] When the cells to be administered are non-autologous or non-MHC compatible cells, they can be administered using well known techniques which prevent the development of a host immune response against the introduced cells. For example, the cells may be introduced in an encapsulated form which, while allowing for an exchange of components with the immediate extracellular environment, does not allow the introduced cells to be recognized by the host immune system.

[0356] Transgenic and “knock-out” animals of the invention have uses which include, but are not limited to, animal model systems useful in elaborating the biological function of polypeptides of the present invention, studying conditions and/or disorders associated with aberrant expression, and in screening for compounds effective in ameliorating such conditions and/or disorders.

Computer Readable Means

[0357] A further aspect of the invention is a computer readable means for storing the nucleic acid and amino acid sequences of the instant invention. In a preferred embodiment, the invention provides a computer readable means for storing SEQ ID NO: 101-240 and SEQ ID NO: 1-100 as described herein, as the complete set of sequences or in any combination. The records of the computer readable means can be accessed for reading and display and for interface with a computer system for the application of programs allowing for the location of data upon a query for data meeting certain criteria, the comparison of sequences, the alignment or ordering of sequences meeting a set of criteria, and the like.

[0358] The nucleic acid and amino acid sequences of the invention are particularly useful as components in databases useful for search analyses as well as in sequence analysis algorithms. As used herein, the terms “nucleic acid sequences of the invention” and “amino acid sequences of the invention” mean any detectable chemical or physical characteristic of a polynucleotide or polypeptide of the invention that is or may be reduced to or stored in a computer readable form. These include, without limitation, chromatographic scan data or peak data, photographic data or scan data therefrom, and mass spectrographic data.

[0359] This invention provides computer readable media having stored thereon sequences of the invention. A computer readable medium may comprise one or more of the following: a nucleic acid sequence comprising a sequence of a nucleic acid sequence of the invention; an amino acid sequence comprising an amino acid sequence of the invention; a set of nucleic acid sequences wherein at least one of said sequences comprises the sequence of a nucleic acid sequence of the invention; a set of amino acid sequences wherein at least one of said sequences comprises the sequence of an amino acid sequence of the invention; a data set representing a nucleic acid sequence comprising the sequence of one or more nucleic acid sequences of the invention; a data set representing a nucleic acid sequence encoding an amino acid sequence comprising the sequence of an amino acid sequence of the invention; a set of nucleic acid sequences wherein at least one of said sequences comprises the sequence of a nucleic acid sequence of the invention; a set of amino acid sequences wherein at least one of said sequences comprises the sequence of an amino acid sequence of the invention; a data set representing a nucleic acid sequence comprising the sequence of a nucleic acid sequence of the invention; a data set representing a nucleic acid sequence encoding an amino acid sequence comprising the sequence of an amino acid sequence of the invention. The computer readable medium can be any composition of matter used to store information or data, including, for example, commercially available floppy disks, tapes, hard drives, compact disks, and video disks.

[0360] Also provided by the invention are methods for the analysis of character sequences, particularly genetic sequences. Preferred methods of sequence analysis include, for example, methods of sequence homology analysis, such as identity and similarity analysis, RNA structure analysis, sequence assembly, cladistic analysis, sequence motif analysis, open reading frame determination, nucleic acid base calling, and sequencing chromatogram peak analysis.

[0361] A computer-based method is provided for performing nucleic acid sequence identity or similarity identification. This method comprises the steps of providing a nucleic acid sequence comprising the sequence of a nucleic acid of the invention in a computer readable medium; and comparing said nucleic acid sequence to at least one nucleic acid or amino acid sequence to identify sequence identity or similarity.

[0362] A computer-based method is also provided for performing amino acid homology identification, said method comprising the steps of: providing an amino acid sequence comprising the sequence of an amino acid of the invention in a computer readable medium; and comparing said amino acid sequence to at least one nucleic acid or an amino acid sequence to identify homology.

[0363] A computer-based method is still further provided for assembly of overlapping nucleic acid sequences into a single nucleic acid sequence, said method comprising the steps of: providing a first nucleic acid sequence comprising the sequence of a nucleic acid of the invention in a computer readable medium; and screening for at least one overlapping region between said first nucleic acid sequence and a second nucleic acid sequence. In addition, the invention includes a method of using patterns of expression associated with either the nucleic acids or proteins in a computer-based method to diagnose disease.

Diagnostic Methods for Ovarian Cancer

[0364] The present invention also relates to quantitative and qualitative diagnostic assays and methods for detecting, diagnosing, monitoring, staging and predicting cancers by comparing expression of a OSNA or a OSP in a human patient that has or may have ovarian cancer, or who is at risk of developing ovarian cancer, with the expression of a OSNA or a OSP in a normal human control. For purposes of the present invention, “expression of a OSNA” or “OSNA expression” means the quantity of OSNA mRNA that can be measured by any method known in the art or the level of transcription that can be measured by any method known in the art in a cell, tissue, organ or whole patient. Similarly, the term “expression of a OSP” or “OSP expression” means the amount of OSP that can be measured by any method known in the art or the level of translation of a OSNA that can be measured by any method known in the art.

[0365] The present invention provides methods for diagnosing ovarian cancer in a patient, by analyzing for changes in levels of OSNA or OSP in cells, tissues, organs or bodily fluids compared with levels of OSNA or OSP in cells, tissues, organs or bodily fluids of preferably the same type from a normal human control, wherein an increase, or decrease in certain cases, in levels of a OSNA or OSP in the patient versus the normal human control is associated with the presence of ovarian cancer or with a predilection to the disease. In another preferred embodiment, the present invention provides methods for diagnosing ovarian cancer in a patient by analyzing changes in the structure of the mRNA of a OSG compared to the mRNA from a normal control. These changes include, without limitation, aberrant splicing, alterations in polyadenylation and/or alterations in 5′ nucleotide capping. In yet another preferred embodiment, the present invention provides methods for diagnosing ovarian cancer in a patient by analyzing changes in a OSP compared to a OSP from a normal patient. These changes include, e.g., alterations, including post translational modifications such as glycosylation and/or phosphorylation of the OSP or changes in the subcellular OSP localization.

[0366] The present invention provides methods for diagnosing colon cancer in a patient, in particular adenocarcinoma, by analyzing for changes in levels of OSNA or OSP in cells, tissues, organs or bodily fluids compared with levels of OSNA or OSP in cells, tissues, organs or bodily fluids of preferably the same type from a normal human control, wherein an increase, or decrease in certain cases, in levels of a OSNA or OSP in the patient versus the normal human control is associated with the presence of colon cancer or with a predilection to the disease. In another preferred embodiment, the present invention provides methods for diagnosing colon cancer in a patient by analyzing changes in the structure of the mRNA of a OSG compared to the mRNA from a normal control. These changes include, without limitation, aberrant splicing, alterations in polyadenylation and/or alterations in 5′ nucleotide capping. In yet another preferred embodiment, the present invention provides methods for diagnosing colon cancer in a patient by analyzing changes in a OSP compared to a OSP from a normal patient. These changes include, e.g., alterations, including post translational modifications such as glycosylation and/or phosphorylation of the OSP or changes in the subcellular OSP localization.

[0367] For purposes of the present invention, diagnosing means that OSNA or OSP levels are used to determine the presence or absence of disease in a patient. As will be understood by those of skill in the art, measurement of other diagnostic parameters may be required for definitive diagnosis or determination of the appropriate treatment for the disease. The determination may be made by a clinician, a doctor, a testing laboratory, or a patient using an over the counter test. The patient may have symptoms of disease or may be asymptomatic. In addition, the OSNA or OSP levels of the present invention may be used as screening marker to determine whether further tests or biopsies are warranted. In addition, the OSNA or OSP levels may be used to determine the vulnerability or susceptibility to disease.

[0368] In a preferred embodiment, the expression of a OSNA is measured by determining the amount of a mRNA that encodes an amino acid sequence selected from SEQ ID NO: 101-240, a homolog, an allelic variant, or a fragment thereof. In a more preferred embodiment, the OSNA expression that is measured is the level of expression of a OSNA mRNA selected from SEQ ID NO: 1-100, or a hybridizing nucleic acid, homologous nucleic acid or allelic variant thereof, or a part of any of these nucleic acid molecules. OSNA expression may be measured by any method known in the art, such as those described supra, including measuring mRNA expression by Northern blot, quantitative or qualitative reverse transcriptase PCR (RT-PCR), microarray, dot or slot blots or in situ hybridization. See, e.g., Ausubel (1992), supra; Ausubel (1999), supra; Sambrook (1989), supra; and Sambrook (2001), supra. OSNA transcription may be measured by any method known in the art including using a reporter gene hooked up to the promoter of a OSG of interest or doing nuclear run-off assays. Alterations in mRNA structure, e.g., aberrant splicing variants, may be determined by any method known in the art, including, RT-PCR followed by sequencing or restriction analysis. As necessary, OSNA expression may be compared to a known control, such as normal ovarian nucleic acid, to detect a change in expression.

[0369] In another preferred embodiment, the expression of a OSP is measured by determining the level of a OSP having an amino acid sequence selected from the group consisting of SEQ ID NO: 101-240, a homolog, an allelic variant, or a fragment thereof. Such levels are preferably determined in at least one of cells, tissues, organs and/or bodily fluids, including determination of normal and abnormal levels. Thus, for instance, a diagnostic assay in accordance with the invention for diagnosing over- or underexpression of a OSNA or OSP compared to normal control bodily fluids, cells, or tissue samples may be used to diagnose the presence of ovarian cancer. The expression level of a OSP may be determined by any method known in the art, such as those described supra. In a preferred embodiment, the OSP expression level may be determined by radioimmunoassays, competitive-binding assays, ELISA, Western blot, FACS, immunohistochemistry, immunoprecipitation, proteomic approaches: two-dimensional gel electrophoresis (2D electrophoresis) and non-gel-based approaches such as mass spectrometry or protein interaction profiling. See, e.g, Harlow (1999), supra; Ausubel (1992), supra; and Ausubel (1999), supra. Alterations in the OSP structure may be determined by any method known in the art, including, e.g., using antibodies that specifically recognize phosphoserine, phosphothreonine or phosphotyrosine residues, two-dimensional polyacrylamide gel electrophoresis (2D PAGE) and/or chemical analysis of amino acid residues of the protein. Id.

[0370] In a preferred embodiment, a radioimmunoassay (RIA) or an ELISA is used. An antibody specific to a OSP is prepared if one is not already available. In a preferred embodiment, the antibody is a monoclonal antibody. The anti-OSP antibody is bound to a solid support and any free protein binding sites on the solid support are blocked with a protein such as bovine serum albumin. A sample of interest is incubated with the antibody on the solid support under conditions in which the OSP will bind to the anti-OSP antibody. The sample is removed, the solid support is washed to remove unbound material, and an anti-OSP antibody that is linked to a detectable reagent (a radioactive substance for RIA and an enzyme for ELISA) is added to the solid support and incubated under conditions in which binding of the OSP to the labeled antibody will occur. After binding, the unbound labeled antibody is removed by washing. For an ELISA, one or more substrates are added to produce a colored reaction product that is based upon the amount of an OSP in the sample. For an RIA, the solid support is counted for radioactive decay signals by any method known in the art. Quantitative results for both RIA and ELISA typically are obtained by reference to a standard curve.

[0371] Other methods to measure OSP levels are known in the art. For instance, a competition assay may be employed wherein an anti-OSP antibody is attached to a solid support and an allocated amount of a labeled OSP and a sample of interest are incubated with the solid support. The amount of labeled OSP attached to the solid support can be correlated to the quantity of a OSP in the sample.

[0372] Of the proteomic approaches, 2D PAGE is a well known technique. Isolation of individual proteins from a sample such as serum is accomplished using sequential separation of proteins by isoelectric point and molecular weight. Typically, polypeptides are first separated by isoelectric point (the first dimension) and then separated by size using an electric current (the second dimension). In general, the second dimension is perpendicular to the first dimension. Because no two proteins with different sequences are identical on the basis of both size and charge, the result of 2D PAGE is a roughly square gel in which each protein occupies a unique spot. Analysis of the spots with chemical or antibody probes, or subsequent protein microsequencing can reveal the relative abundance of a given protein and the identity of the proteins in the sample.

[0373] Expression levels of a OSNA can be determined by any method known in the art, including PCR and other nucleic acid methods, such as ligase chain reaction (LCR) and nucleic acid sequence based amplification (NASBA), can be used to detect malignant cells for diagnosis and monitoring of various malignancies. For example, reverse-transcriptase PCR (RT-PCR) is a powerful technique which can be used to detect the presence of a specific mRNA population in a complex mixture of thousands of other mRNA species. In RT-PCR, an mRNA species is first reverse transcribed to complementary DNA (cDNA) with use of the enzyme reverse transcriptase; the cDNA is then amplified as in a standard PCR reaction.

[0374] Hybridization to specific DNA molecules (e.g., oligonucleotides) arrayed on a solid support can be used to both detect the expression of and quantitate the level of expression of one or more OSNAs of interest. In this approach, all or a portion of one or more OSNAs is fixed to a substrate. A sample of interest, which may comprise RNA, e.g., total RNA or polyA-selected mRNA, or a complementary DNA (cDNA) copy of the RNA is incubated with the solid support under conditions in which hybridization will occur between the DNA on the solid support and the nucleic acid molecules in the sample of interest. Hybridization between the substrate-bound DNA and the nucleic acid molecules in the sample can be detected and quantitated by several means, including, without limitation, radioactive labeling or fluorescent labeling of the nucleic acid molecule or a secondary molecule designed to detect the hybrid.

[0375] The above tests can be carried out on samples derived from a variety of cells, bodily fluids and/or tissue extracts such as homogenates or solubilized tissue obtained from a patient. Tissue extracts are obtained routinely from tissue biopsy and autopsy material. Bodily fluids useful in the present invention include blood, urine, saliva or any other bodily secretion or derivative thereof. As used herein “blood” includes whole blood, plasma, serum, circulating epithelial cells, constituents, or any derivative of blood.

[0376] In addition to detection in bodily fluids, the proteins and nucleic acids of the invention are suitable to detection by cell capture technology. Whole cells may be captured by a variety methods for example magnetic separation, U.S. Pat. Nos. 5,200,084; 5,186,827; 5,108,933; 4,925,788, the disclosures of which are incorporated herein by reference in their entireties. Epithelial cells may be captured using such products as Dynabeads® or CELLection™ (Dynal Biotech, Oslo, Norway). Alternatively, fractions of blood may be captured, e.g., the buffy coat fraction (50 mm cells isolated from 5 ml of blood) containing epithelial cells. In addition, cancer cells may be captured using the techniques described in WO 00/47998, the disclosure of which is incorporated herein by reference in its entirety. Once the cells are captured or concentrated, the proteins or nucleic acids are detected by the means described in the subject application. Alternatively, nucleic acids may be captured directly from blood samples, see U.S. Pat. Nos. 6,156,504, 5,501,963; or WO 01/42504, the disclosures of which are incorporated herein by reference in their entireties.

[0377] In a preferred embodiment, the specimen tested for expression of OSNA or OSP includes without limitation ovarian tissue, ovarian cells grown in cell culture, blood, serum, lymph node tissue, and lymphatic fluid. In another preferred embodiment, especially when metastasis of a primary ovarian cancer is known or suspected, specimens include, without limitation, tissues from brain, bone, bone marrow, liver, lungs, colon, and adrenal glands. In general, the tissues may be sampled by biopsy, including, without limitation, needle biopsy, e.g., transthoracic needle aspiration, cervical mediatinoscopy, endoscopic lymph node biopsy, video-assisted thoracoscopy, exploratory thoracotomy, bone marrow biopsy and bone marrow aspiration.

[0378] All the methods of the present invention may optionally include determining the expression levels of one or more other cancer markers in addition to determining the expression level of a OSNA or OSP. In many cases, the use of another cancer marker will decrease the likelihood of false positives or false negatives. In one embodiment, the one or more other cancer markers include other OSNA or OSPs as disclosed herein. Other cancer markers useful in the present invention will depend on the cancer being tested and are known to those of skill in the art. In a preferred embodiment, at least one other cancer marker in addition to a particular OSNA or OSP is measured. In a more preferred embodiment, at least two other additional cancer markers are used. In an even more preferred embodiment, at least three, more preferably at least five, even more preferably at least ten additional cancer markers are used.

[0379] In a preferred embodiment, the specimen tested for expression of OSNA or OSP includes without limitation colon tissue, fecal samples, colonocytes, colon cells grown in cell culture, blood, serum, lymph node tissue, and lymphatic fluid. In another preferred embodiment, especially when metastasis of a primary colon cancer is known or suspected, specimens include, without limitation, tissues from brain, bone, bone marrow, liver, lungs, and adrenal glands. In general, the tissues may be sampled by biopsy, including, without limitation, needle biopsy, e.g., transthoracic needle aspiration, cervical mediatinoscopy, endoscopic lymph node biopsy, video-assisted thoracoscopy, exploratory thoracotomy, bone marrow biopsy and bone marrow aspiration.

[0380] Colonocytes represent an important source of the OSP or OSNAs because they provide a picture of the immediate past metabolic history of the GI tract of a subject. In addition, such cells are representative of the cell population from a statistically large sampling frame reflecting the state of the colonic mucosa along the entire length of the colon in a non-invasive manner, in contrast to a limited sampling by colonic biopsy using an invasive procedure involving endoscopy. Specific examples of patents describing the isolation of colonocytes include U.S. Pat. Nos. 6,335,193; 6,020,137 5,741,650; 6,258,541; US 2001 0026925 A1; WO 00/63358 A1, the disclosures of which are incorporated herein by reference in their entireties.

[0381] All the methods of the present invention may optionally include determining the expression levels of one or more other cancer markers in addition to determining the expression level of a OSNA or OSP. In many cases, the use of another cancer marker will decrease the likelihood of false positives or false negatives. In one embodiment, the one or more other cancer markers include other OSNA or OSPs as disclosed herein. Other cancer markers useful in the present invention will depend on the cancer being tested and are known to those of skill in the art. In a preferred embodiment, at least one other cancer marker in addition to a particular OSNA or OSP is measured. In a more preferred embodiment, at least two other additional cancer markers are used. In an even more preferred embodiment, at least three, more preferably at least five, even more preferably at least ten additional cancer markers are used.

[0382] Diagnosing

[0383] In one aspect, the invention provides a method for determining the expression levels and/or structural alterations of one or more OSNA and/or OSP in a sample from a patient suspected of having ovarian cancer. In general, the method comprises the steps of obtaining the sample from the patient, determining the expression level or structural alterations of a OSNA and/or OSP and then ascertaining whether the patient has ovarian cancer from the expression level of the OSNA or OSP. In general, if high expression relative to a control of a OSNA or OSP is indicative of ovarian cancer, a diagnostic assay is considered positive if the level of expression of the OSNA or OSP is at least one and a half times higher, and more preferably are at least two times higher, still more preferably five times higher, even more preferably at least ten times higher, than in preferably the same cells, tissues or bodily fluid of a normal human control. In contrast, if low expression relative to a control of a OSNA or OSP is indicative of ovarian cancer, a diagnostic assay is considered positive if the level of expression of the OSNA or OSP is at least one and a half times lower, and more preferably are at least two times lower, still more preferably five times lower, even more preferably at least ten times lower than in preferably the same cells, tissues or bodily fluid of a normal human control. The normal human control may be from a different patient or from uninvolved tissue of the same patient.

[0384] The present invention also provides a method of determining whether ovarian cancer has metastasized in a patient. One may identify whether the ovarian cancer has metastasized by measuring the expression levels and/or structural alterations of one or more OSNAs and/or OSPs in a variety of tissues. The presence of a OSNA or OSP in a certain tissue at levels higher than that of corresponding noncancerous tissue (e.g., the same tissue from another individual) is indicative of metastasis if high level expression of a OSNA or OSP is associated with ovarian cancer. Similarly, the presence of a OSNA or OSP in a tissue at levels lower than that of corresponding noncancerous tissue is indicative of metastasis if low level expression of a OSNA or OSP is associated with ovarian cancer. Further, the presence of a structurally altered OSNA or OSP that is associated with ovarian cancer is also indicative of metastasis.

[0385] In general, if high expression relative to a control of a OSNA or OSP is indicative of metastasis, an assay for metastasis is considered positive if the level of expression of the OSNA or OSP is at least one and a half times higher, and more preferably are at least two times higher, still more preferably five times higher, even more preferably at least ten times higher, than in preferably the same cells, tissues or bodily fluid of a normal human control. In contrast, if low expression relative to a control of a OSNA or OSP is indicative of metastasis, an assay for metastasis is considered positive if the level of expression of the OSNA or OSP is at least one and a half times lower, and more preferably are at least two times lower, still more preferably five times lower, even more preferably at least ten times lower than in preferably the same cells, tissues or bodily fluid of a normal human control.

[0386] Staging

[0387] The invention also provides a method of staging ovarian cancer in a human patient. The method comprises identifying a human patient having ovarian cancer and analyzing cells, tissues or bodily fluids from such human patient for expression levels and/or structural alterations of one or more OSNAs or OSPs. First, one or more tumors from a variety of patients are staged according to procedures well known in the art, and the expression levels of one or more OSNAs or OSPs is determined for each stage to obtain a standard expression level for each OSNA and OSP. Then, the OSNA or OSP expression levels of the OSNA or OSP are determined in a biological sample from a patient whose stage of cancer is not known. The OSNA or OSP expression levels from the patient are then compared to the standard expression level. By comparing the expression level of the OSNAs and OSPs from the patient to the standard expression levels, one may determine the stage of the tumor. The same procedure may be followed using structural alterations of a OSNA or OSP to determine the stage of a ovarian cancer.

[0388] Monitoring

[0389] Further provided is a method of monitoring ovarian cancer in a human patient. One may monitor a human patient to determine whether there has been metastasis and, if there has been, when metastasis began to occur. One may also monitor a human patient to determine whether a preneoplastic lesion has become cancerous. One may also monitor a human patient to determine whether a therapy, e.g., chemotherapy, radiotherapy or surgery, has decreased or eliminated the ovarian cancer. The monitoring may determine if there has been a reoccurrence and, if so, determine its nature. The method comprises identifying a human patient that one wants to monitor for ovarian cancer, periodically analyzing cells, tissues or bodily fluids from such human patient for expression levels of one or more OSNAs or OSPs, and comparing the OSNA or OSP levels over time to those OSNA or OSP expression levels obtained previously. Patients may also be monitored by measuring one or more structural alterations in a OSNA or OSP that are associated with ovarian cancer.

[0390] If increased expression of a OSNA or OSP is associated with metastasis, treatment failure, or conversion of a preneoplastic lesion to a cancerous lesion, then detecting an increase in the expression level of a OSNA or OSP indicates that the tumor is metastasizing, that treatment has failed or that the lesion is cancerous, respectively. One having ordinary skill in the art would recognize that if this were the case, then a decreased expression level would be indicative of no metastasis, effective therapy or failure to progress to a neoplastic lesion. If decreased expression of a OSNA or OSP is associated with metastasis, treatment failure, or conversion of a preneoplastic lesion to a cancerous lesion, then detecting a decrease in the expression level of a OSNA or OSP indicates that the tumor is metastasizing, that treatment has failed or that the lesion is cancerous, respectively. In a preferred embodiment, the levels of OSNAs or OSPs are determined from the same cell type, tissue or bodily fluid as prior patient samples. Monitoring a patient for onset of ovarian cancer metastasis is periodic and preferably is done on a quarterly basis, but may be done more or less frequently.

[0391] The methods described herein can further be utilized as prognostic assays to identify subjects having or at risk of developing a disease or disorder associated with increased or decreased expression levels of a OSNA and/or OSP. The present invention provides a method in which a test sample is obtained from a human patient and one or more OSNAs and/or OSPs are detected. The presence of higher (or lower) OSNA or OSP levels as compared to normal human controls is diagnostic for the human patient being at risk for developing cancer, particularly ovarian cancer. The effectiveness of therapeutic agents to decrease (or increase) expression or activity of one or more OSNAs and/or OSPs of the invention can also be monitored by analyzing levels of expression of the OSNAs and/or OSPs in a human patient in clinical trials or in in vitro screening assays such as in human cells. In this way, the gene expression pattern can serve as a marker, indicative of the physiological response of the human patient or cells, as the case may be, to the agent being tested.

[0392] Detection of Genetic Lesions or Mutations

[0393] The methods of the present invention can also be used to detect genetic lesions or mutations in a OSG, thereby determining if a human with the genetic lesion is susceptible to developing ovarian cancer or to determine what genetic lesions are responsible, or are partly responsible, for a person's existing ovarian cancer. Genetic lesions can be detected, for example, by ascertaining the existence of a deletion, insertion and/or substitution of one or more nucleotides from the OSGs of this invention, a chromosomal rearrangement of a OSG, an aberrant modification of a OSG (such as of the methylation pattern of the genomic DNA), or allelic loss of a OSG. Methods to detect such lesions in the OSG of this invention are known to those having ordinary skill in the art following the teachings of the specification.

Methods of Detecting Noncancerous Ovarian Diseases

[0394] The present invention also provides methods for determining the expression levels and/or structural alterations of one or more OSNAs and/or OSPs in a sample from a patient suspected of having or known to have a noncancerous ovarian disease. In general, the method comprises the steps of obtaining a sample from the patient, determining the expression level or structural alterations of a OSNA and/or OSP, comparing the expression level or structural alteration of the OSNA or OSP to a normal ovarian control, and then ascertaining whether the patient has a noncancerous ovarian disease. In general, if high expression relative to a control of a OSNA or OSP is indicative of a particular noncancerous ovarian disease, a diagnostic assay is considered positive if the level of expression of the OSNA or OSP is at least two times higher, and more preferably are at least five times higher, even more preferably at least ten times higher, than in preferably the same cells, tissues or bodily fluid of a normal human control. In contrast, if low expression relative to a control of a OSNA or OSP is indicative of a noncancerous ovarian disease, a diagnostic assay is considered positive if the level of expression of the OSNA or OSP is at least two times lower, more preferably are at least five times lower, even more preferably at least ten times lower than in preferably the same cells, tissues or bodily fluid of a normal human control. The normal human control may be from a different patient or from uninvolved tissue of the same patient.

[0395] One having ordinary skill in the art may determine whether a OSNA and/or OSP is associated with a particular noncancerous ovarian disease by obtaining ovarian tissue from a patient having a noncancerous ovarian disease of interest and determining which OSNAs and/or OSPs are expressed in the tissue at either a higher or a lower level than in normal ovarian tissue. In another embodiment, one may determine whether a OSNA or OSP exhibits structural alterations in a particular noncancerous ovarian disease state by obtaining ovarian tissue from a patient having a noncancerous ovarian disease of interest and determining the structural alterations in one or more OSNAs and/or OSPs relative to normal ovarian tissue.

Methods for Identifying Ovarian Tissue

[0396] In another aspect, the invention provides methods for identifying ovarian tissue. These methods are particularly useful in, e.g., forensic science, ovarian cell differentiation and development, and in tissue engineering.

[0397] In one embodiment, the invention provides a method for determining whether a sample is ovarian tissue or has ovarian tissue-like characteristics. The method comprises the steps of providing a sample suspected of comprising ovarian tissue or having ovarian tissue-like characteristics, determining whether the sample expresses one or more OSNAs and/or OSPs, and, if the sample expresses one or more OSNAs and/or OSPs, concluding that the sample comprises ovarian tissue. In a preferred embodiment, the OSNA encodes a polypeptide having an amino acid sequence selected from SEQ ID NO: 101-240, or a homolog, allelic variant or fragment thereof. In a more preferred embodiment, the OSNA has a nucleotide sequence selected from SEQ ID NO: 1-100, or a hybridizing nucleic acid, an allelic variant or a part thereof. Determining whether a sample expresses a OSNA can be accomplished by any method known in the art. Preferred methods include hybridization to microarrays, Northern blot hybridization, and quantitative or qualitative RT-PCR. In another preferred embodiment, the method can be practiced by determining whether a OSP is expressed. Determining whether a sample expresses a OSP can be accomplished by any method known in the art. Preferred methods include Western blot, ELISA, RIA and 2D PAGE. In one embodiment, the OSP has an amino acid sequence selected from SEQ ID NO: 101-240, or a homolog, allelic variant or fragment thereof. In another preferred embodiment, the expression of at least two OSNAs and/or OSPs is determined. In a more preferred embodiment, the expression of at least three, more preferably four and even more preferably five OSNAs and/or OSPs are determined.

[0398] In one embodiment, the method can be used to determine whether an unknown tissue is ovarian tissue. This is particularly useful in forensic science, in which small, damaged pieces of tissues that are not identifiable by microscopic or other means are recovered from a crime or accident scene. In another embodiment, the method can be used to determine whether a tissue is differentiating or developing into ovarian tissue. This is important in monitoring the effects of the addition of various agents to cell or tissue culture, e.g., in producing new ovarian tissue by tissue engineering. These agents include, e.g., growth and differentiation factors, extracellular matrix proteins and culture medium. Other factors that may be measured for effects on tissue development and differentiation include gene transfer into the cells or tissues, alterations in pH, aqueous:air interface and various other culture conditions.

Methods for Producing and Modifying Ovarian Tissue

[0399] In another aspect, the invention provides methods for producing engineered ovarian tissue or cells. In one embodiment, the method comprises the steps of providing cells, introducing a OSNA or a OSG into the cells, and growing the cells under conditions in which they exhibit one or more properties of ovarian tissue cells. In a preferred embodiment, the cells are pleuripotent. As is well known in the art, normal ovarian tissue comprises a large number of different cell types. Thus, in one embodiment, the engineered ovarian tissue or cells comprises one of these cell types. In another embodiment, the engineered ovarian tissue or cells comprises more than one ovarian cell type. Further, the culture conditions of the cells or tissue may require manipulation in order to achieve full differentiation and development of the ovarian cell tissue. Methods for manipulating culture conditions are well known in the art.

[0400] Nucleic acid molecules encoding one or more OSPs are introduced into cells, preferably pleuripotent cells. In a preferred embodiment, the nucleic acid molecules encode OSPs having amino acid sequences selected from SEQ ID NO: 101-240, or homologous proteins, analogs, allelic variants or fragments thereof. In a more preferred embodiment, the nucleic acid molecules have a nucleotide sequence selected from SEQ ID NO: 1-100, or hybridizing nucleic acids, allelic variants or parts thereof. In another highly preferred embodiment, a OSG is introduced into the cells. Expression vectors and methods of introducing nucleic acid molecules into cells are well known in the art and are described in detail, supra.

[0401] Artificial ovarian tissue may be used to treat patients who have lost some or all of their ovarian function.

Pharmaceutical Compositions

[0402] In another aspect, the invention provides pharmaceutical compositions comprising the nucleic acid molecules, polypeptides, fusion proteins, antibodies, antibody derivatives, antibody fragments, agonists, antagonists, or inhibitors of the present invention. In a preferred embodiment, the pharmaceutical composition comprises a OSNA or part thereof. In a more preferred embodiment, the OSNA has a nucleotide sequence selected from the group consisting of SEQ ID NO: 1-100, a nucleic acid that hybridizes thereto, an allelic variant thereof, or a nucleic acid that has substantial sequence identity thereto. In another preferred embodiment, the pharmaceutical composition comprises a OSP or fragment thereof. In a more preferred embodiment, the pharmaceutical composition comprises a OSP having an amino acid sequence that is selected from the group consisting of SEQ ID NO: 101-240, a polypeptide that is homologous thereto, a fusion protein comprising all or a portion of the polypeptide, or an analog or derivative thereof. In another preferred embodiment, the pharmaceutical composition comprises an anti-OSP antibody, preferably an antibody that specifically binds to a OSP having an amino acid that is selected from the group consisting of SEQ ID NO: 101-240, or an antibody that binds to a polypeptide that is homologous thereto, a fusion protein comprising all or a portion of the polypeptide, or an analog or derivative thereof.

[0403] Due to the association of angiogenesis with cancer vascularization there is great need of new markers and methods for diagnosing angiogenesis activity to identify developing tumors and angiogenesis related diseases. Furthermore, great need is also present for new molecular targets useful in the treatment of angiogenesis and angiogenesis related diseases such as cancer. In addition known modulators of angiogenesis such as endostatin or vascular endothelial growth factor (VEGF). Use of the methods and compositions disclosed herein in combination with anti-angiogenesis drugs, drugs that block the matrix breakdown (such as BMS-275291, Dalteparin (Fragmin®), Suramin), drugs that inhibit endothelial cells (2-methoxyestradiol (2-ME), CC-5013 (Thalidomide Analog), Combretastatin A4 Phosphate, LY317615 (Protein Kinase C Beta Inhibitor), Soy Isoflavone (Genistein; Soy Protein Isolate), Thalidomide), drugs that block activators of angiogenesis (AE-941 (Neovastat™; GW786034), Anti-VEGF Antibody (Bevacizumab; Avastin™), Interferon-alpha, PTK787/ZK 222584, VEGF-Trap, ZD6474), Drugs that inhibit endothelial-specific integrin/survival signaling (EMD 121974, Anti-Anb3 Integrin Antibody (Medi-522; Vitaxin™)).

[0404] Such a composition typically contains from about 0.1 to 90% by weight of a therapeutic agent of the invention formulated in and/or with a pharmaceutically acceptable carrier or excipient.

[0405] Pharmaceutical formulation is a well-established art that is further described in Gennaro (ed.), Remington: The Science and Practice of Pharmacy, 20^{th} ed., Lippincott, Williams & Wilkins (2000); Ansel et al., Pharmaceutical Dosage Forms and Drug Delivery Systems, 7^{th} ed., Lippincott Williams & Wilkins (1999); and Kibbe (ed.), Handbook of Pharmaceutical Excipients American Pharmaceutical Association, 3^{rd} ed. (2000) and thus need not be described in detail herein.

[0406] Briefly, formulation of the pharmaceutical compositions of the present invention will depend upon the route chosen for administration. The pharmaceutical compositions utilized in this invention can be administered by various routes including both enteral and parenteral routes, including oral, intravenous, intramuscular, subcutaneous, inhalation, topical, sublingual, rectal, intra-arterial, intramedullary, intrathecal, intraventricular, transmucosal, transdermal, intranasal, intraperitoneal, intrapulmonary, and intrauterine.

[0407] Oral dosage forms can be formulated as tablets, pills, dragees, capsules, liquids, gels, syrups, slurries, suspensions, and the like, for ingestion by the patient.

[0408] Solid formulations of the compositions for oral administration can contain suitable carriers or excipients, such as carbohydrate or protein fillers, such as sugars, including lactose, sucrose, mannitol, or sorbitol; starch from corn, wheat, rice, potato, or other plants; cellulose, such as methyl cellulose, hydroxypropylmethyl-cellulose, sodium carboxymethylcellulose, or microcrystalline cellulose; gums including arabic and tragacanth; proteins such as gelatin and collagen; inorganics, such as kaolin, calcium carbonate, dicalcium phosphate, sodium chloride; and other agents such as acacia and alginic acid.

[0409] Agents that facilitate disintegration and/or solubilization can be added, such as the cross-linked polyvinyl pyrrolidone, agar, alginic acid, or a salt thereof, such as sodium alginate, microcrystalline cellulose, cornstarch, sodium starch glycolate, and alginic acid.

[0410] Tablet binders that can be used include acacia, methylcellulose, sodium carboxymethylcellulose, polyvinylpyrrolidone (Povidone™), hydroxypropyl methylcellulose, sucrose, starch and ethylcellulose.

[0411] Lubricants that can be used include magnesium stearates, stearic acid, silicone fluid, talc, waxes, oils, and colloidal silica.

[0412] Fillers, agents that facilitate disintegration and/or solubilization, tablet binders and lubricants, including the aforementioned, can be used singly or in combination.

[0413] Solid oral dosage forms need not be uniform throughout. For example, dragee cores can be used in conjunction with suitable coatings, such as concentrated sugar solutions, which can also contain gum arabic, talc, polyvinylpyrrolidone, carbopol gel, polyethylene glycol, and/or titanium dioxide, lacquer solutions, and suitable organic solvents or solvent mixtures.

[0414] Oral dosage forms of the present invention include push-fit capsules made of gelatin, as well as soft, sealed capsules made of gelatin and a coating, such as glycerol or sorbitol. Push-fit capsules can contain active ingredients mixed with a filler or binders, such as lactose or starches, lubricants, such as talc or magnesium stearate, and, optionally, stabilizers. In soft capsules, the active compounds can be dissolved or suspended in suitable liquids, such as fatty oils, liquid, or liquid polyethylene glycol with or without stabilizers.

[0415] Additionally, dyestuffs or pigments can be added to the tablets or dragee coatings for product identification or to characterize the quantity of active compound, i.e., dosage.

[0416] Liquid formulations of the pharmaceutical compositions for oral (enteral) administration are prepared in water or other aqueous vehicles and can contain various suspending agents such as methylcellulose, alginates, tragacanth, pectin, kelgin, carrageenan, acacia, polyvinylpyrrolidone, and polyvinyl alcohol. The liquid formulations can also include solutions, emulsions, syrups and elixirs containing, together with the active compound(s), wetting agents, sweeteners, and coloring and flavoring agents.

[0417] The pharmaceutical compositions of the present invention can also be formulated for parenteral administration. Formulations for parenteral administration can be in the form of aqueous or non-aqueous isotonic sterile injection solutions or suspensions.

[0418] For intravenous injection, water soluble versions of the compounds of the present invention are formulated in, or if provided as a lyophilate, mixed with, a physiologically acceptable fluid vehicle, such as 5% dextrose (“D5”), physiologically buffered saline, 0.9% saline, Hanks' solution, or Ringer's solution. Intravenous formulations may include carriers, excipients or stabilizers including, without limitation, calcium, human serum albumin, citrate, acetate, calcium chloride, carbonate, and other salts.

[0419] Intramuscular preparations, e.g. a sterile formulation of a suitable soluble salt form of the compounds of the present invention, can be dissolved and administered in a pharmaceutical excipient such as Water-for-Injection, 0.9% saline, or 5% glucose solution. Alternatively, a suitable insoluble form of the compound can be prepared and administered as a suspension in an aqueous base or a pharmaceutically acceptable oil base, such as an ester of a long chain fatty acid (e.g., ethyl oleate), fatty oils such as sesame oil, triglycerides, or liposomes.

[0420] Parenteral formulations of the compositions can contain various carriers such as vegetable oils, dimethylacetamide, dimethylformamide, ethyl lactate, ethyl carbonate, isopropyl myristate, ethanol, polyols (glycerol, propylene glycol, liquid polyethylene glycol, and the like).

[0421] Aqueous injection suspensions can also contain substances that increase the viscosity of the suspension, such as sodium carboxymethyl cellulose, sorbitol, or dextran. Non-lipid polycationic amino polymers can also be used for delivery. Optionally, the suspension can also contain suitable stabilizers or agents that increase the solubility of the compounds to allow for the preparation of highly concentrated solutions.

[0422] Pharmaceutical compositions of the present invention can also be formulated to permit injectable, long-term, deposition. Injectable depot forms may be made by forming microencapsulated matrices of the compound in biodegradable polymers such as polylactide-polyglycolide. Depending upon the ratio of drug to polymer and the nature of the particular polymer employed, the rate of drug release can be controlled. Examples of other biodegradable polymers include poly(orthoesters) and poly(anhydrides). Depot injectable formulations are also prepared by entrapping the drug in microemulsions that are compatible with body tissues.

[0423] The pharmaceutical compositions of the present invention can be administered topically. For topical use the compounds of the present invention can also be prepared in suitable forms to be applied to the skin, or mucus membranes of the nose and throat, and can take the form of lotions, creams, ointments, liquid sprays or inhalants, drops, tinctures, lozenges, or throat paints. Such topical formulations further can include chemical compounds such as dimethylsulfoxide (DMSO) to facilitate surface penetration of the active ingredient. In other transdermal formulations, typically in patch-delivered formulations, the pharmaceutically active compound is formulated with one or more skin penetrants, such as 2-N-methyl-pyrrolidone (NMP) or Azone. A topical semi-solid ointment formulation typically contains a concentration of the active ingredient from about 1 to 20%, e.g., 5 to 10%, in a carrier such as a pharmaceutical cream base.

[0424] For application to the eyes or ears, the compounds of the present invention can be presented in liquid or semi-liquid form formulated in hydrophobic or hydrophilic bases as ointments, creams, lotions, paints or powders.

[0425] For rectal administration the compounds of the present invention can be administered in the form of suppositories admixed with conventional carriers such as cocoa butter, wax or other glyceride.

[0426] Inhalation formulations can also readily be formulated. For inhalation, various powder and liquid formulations can be prepared. For aerosol preparations, a sterile formulation of the compound or salt form of the compound may be used in inhalers, such as metered dose inhalers, and nebulizers. Aerosolized forms may be especially useful for treating respiratory disorders.

[0427] Alternatively, the compounds of the present invention can be in powder form for reconstitution in the appropriate pharmaceutically acceptable carrier at the time of delivery.

[0428] The pharmaceutically active compound in the pharmaceutical compositions of the present invention can be provided as the salt of a variety of acids, including but not limited to hydrochloric, sulfuric, acetic, lactic, tartaric, malic, and succinic acid. Salts tend to be more soluble in aqueous or other protonic solvents than are the corresponding free base forms.

[0429] After pharmaceutical compositions have been prepared, they are packaged in an appropriate container and labeled for treatment of an indicated condition.

[0430] The active compound will be present in an amount effective to achieve the intended purpose. The determination of an effective dose is well within the capability of those skilled in the art.

[0431] A “therapeutically effective dose” refers to that amount of active ingredient, for example OSP polypeptide, fusion protein, or fragments thereof, antibodies specific for OSP, agonists, antagonists or inhibitors of OSP, which ameliorates the signs or symptoms of the disease or prevent progression thereof; as would be understood in the medical arts, cure, although desired, is not required.

[0432] The therapeutically effective dose of the pharmaceutical agents of the present invention can be estimated initially by in vitro tests, such as cell culture assays, followed by assay in model animals, usually mice, rats, rabbits, dogs, or pigs. The animal model can also be used to determine an initial preferred concentration range and route of administration.

[0433] For example, the ED50 (the dose therapeutically effective in 50% of the population) and LD50 (the dose lethal to 50% of the population) can be determined in one or more cell culture of animal model systems. The dose ratio of toxic to therapeutic effects is the therapeutic index, which can be expressed as LD50/ED50. Pharmaceutical compositions that exhibit large therapeutic indices are preferred.

[0434] The data obtained from cell culture assays and animal studies are used in formulating an initial dosage range for human use, and preferably provide a range of circulating concentrations that includes the ED50 with little or no toxicity. After administration, or between successive administrations, the circulating concentration of active agent varies within this range depending upon pharmacokinetic factors well known in the art, such as the dosage form employed, sensitivity of the patient, and the route of administration.

[0435] The exact dosage will be determined by the practitioner, in light of factors specific to the subject requiring treatment. Factors that can be taken into account by the practitioner include the severity of the disease state, general health of the subject, age, weight, gender of the subject, diet, time and frequency of administration, drug combination(s), reaction sensitivities, and tolerance/response to therapy. Long-acting pharmaceutical compositions can be administered every 3 to 4 days, every week, or once every two weeks depending on half-life and clearance rate of the particular formulation.

[0436] Normal dosage amounts may vary from 0.1 to 100,000 micrograms, up to a total dose of about 1 g, depending upon the route of administration. Where the therapeutic agent is a protein or antibody of the present invention, the therapeutic protein or antibody agent typically is administered at a daily dosage of 0.01 mg to 30 mg/kg of body weight of the patient (e.g., 1 mg/kg to 5 mg/kg). The pharmaceutical formulation can be administered in multiple doses per day, if desired, to achieve the total desired daily dose.

[0437] Guidance as to particular dosages and methods of delivery is provided in the literature and generally available to practitioners in the art. Those skilled in the art will employ different formulations for nucleotides than for proteins or their inhibitors. Similarly, delivery of polynucleotides or polypeptides will be specific to particular cells, conditions, locations, etc.

[0438] Conventional methods, known to those of ordinary skill in the art of medicine, can be used to administer the pharmaceutical formulation(s) of the present invention to the patient. The pharmaceutical compositions of the present invention can be administered alone, or in combination with other therapeutic agents or interventions.

Therapeutic Methods

[0439] The present invention further provides methods of treating subjects having defects in a gene of the invention, e.g., in expression, activity, distribution, localization, and/or solubility, which can manifest as a disorder of ovarian function. As used herein, “treating” includes all medically-acceptable types of therapeutic intervention, including palliation and prophylaxis (prevention) of disease. The term “treating” encompasses any improvement of a disease, including minor improvements. These methods are discussed below.

[0440] Gene Therapy and Vaccines

[0441] The isolated nucleic acids of the present invention can also be used to drive in vivo expression of the polypeptides of the present invention. In vivo expression can be driven from a vector, typically a viral vector, often a vector based upon a replication incompetent retrovirus, an adenovirus, or an adeno-associated virus (AAV), for the purpose of gene therapy. In vivo expression can also be driven from signals endogenous to the nucleic acid or from a vector, often a plasmid vector, such as pVAX1 (Invitrogen, Carlsbad, Calif., USA), for purpose of “naked” nucleic acid vaccination, as further described in U.S. Pat. Nos. 5,589,466; 5,679,647; 5,804,566; 5,830,877; 5,843,913; 5,880,104; 5,958,891; 5,985,847; 6,017,897; 6,110,898; 6,204,250, the disclosures of which are incorporated herein by reference in their entireties. For cancer therapy, it is preferred that the vector also be tumor-selective. See, e.g., Doronin et al., J. Virol. 75: 3314-24 (2001).

[0442] In another embodiment of the therapeutic methods of the present invention, a therapeutically effective amount of a pharmaceutical composition comprising a nucleic acid molecule of the present invention is administered. The nucleic acid molecule can be delivered in a vector that drives expression of a OSP, fusion protein, or fragment thereof, or without such vector. Nucleic acid compositions that can drive expression of a OSP are administered, for example, to complement a deficiency in the native OSP, or as DNA vaccines. Expression vectors derived from virus, replication deficient retroviruses, adenovirus, adeno-associated (AAV) virus, herpes virus, or vaccinia virus can be used as can plasmids. See, e.g., Cid-Arregui, supra. In a preferred embodiment, the nucleic acid molecule encodes a OSP having the amino acid sequence of SEQ ID NO: 101-240, or a fragment, fusion protein, allelic variant or homolog thereof.

[0443] In still other therapeutic methods of the present invention, pharmaceutical compositions comprising host cells that express a OSP, fusions, or fragments thereof can be administered. In such cases, the cells are typically autologous, so as to circumvent xenogeneic or allotypic rejection, and are administered to complement defects in OSP production or activity. In a preferred embodiment, the nucleic acid molecules in the cells encode a OSP having the amino acid sequence of SEQ ID NO: 101-240, or a fragment, fusion protein, allelic variant or homolog thereof.

[0444] Antisense Administration

[0445] Antisense nucleic acid compositions, or vectors that drive expression of a OSG antisense nucleic acid, are administered to downregulate transcription and/or translation of a OSG in circumstances in which excessive production, or production of aberrant protein, is the pathophysiologic basis of disease.

[0446] Antisense compositions useful in therapy can have a sequence that is complementary to coding or to noncoding regions of a OSG. For example, oligonucleotides derived from the transcription initiation site, e.g., between positions −10 and +10 from the start site, are preferred.

[0447] Catalytic antisense compositions, such as ribozymes, that are capable of sequence-specific hybridization to OSG transcripts, are also useful in therapy. See, e.g., Phylactou, Adv. Drug Deliv. Rev. 44(2-3): 97-108 (2000); Phylactou et al., Hum. Mol. Genet. 7(10): 1649-53 (1998); Rossi, Ciba Found. Symp. 209: 195-204 (1997); and Sigurdsson et al., Trends Biotechnol. 13(8): 286-9 (1995).

[0448] Other nucleic acids useful in the therapeutic methods of the present invention are those that are capable of triplex helix formation in or near the OSG genomic locus. Such triplexing oligonucleotides are able to inhibit transcription. See, e.g., Intody et al., Nucleic Acids Res. 28(21): 4283-90 (2000); and McGuffie et al., Cancer Res. 60(14): 3790-9 (2000). Pharmaceutical compositions comprising such triplex forming oligos (TFOs) are administered in circumstances in which excessive production, or production of aberrant protein, is a pathophysiologic basis of disease.

[0449] In a preferred embodiment, the antisense molecule is derived from a nucleic acid molecule encoding a OSP, preferably a OSP comprising an amino acid sequence of SEQ ID NO: 101-240, or a fragment, allelic variant or homolog thereof. In a more preferred embodiment, the antisense molecule is derived from a nucleic acid molecule having a nucleotide sequence of SEQ ID NO: 1-100, or a part, allelic variant, substantially similar or hybridizing nucleic acid thereof.

[0450] Polypeptide Administration

[0451] In one embodiment of the therapeutic methods of the present invention, a therapeutically effective amount of a pharmaceutical composition comprising a OSP, a fusion protein, fragment, analog or derivative thereof is administered to a subject with a clinically-significant OSP defect.

[0452] Protein compositions are administered, for example, to complement a deficiency in native OSP. In other embodiments, protein compositions are administered as a vaccine to elicit a humoral and/or cellular immune response to OSP. The immune response can be used to modulate activity of OSP or, depending on the immunogen, to immunize against aberrant or aberrantly expressed forms, such as mutant or inappropriately expressed isoforms. In yet other embodiments, protein fusions having a toxic moiety are administered to ablate cells that aberrantly accumulate OSP.

[0453] In a preferred embodiment, the polypeptide administered is a OSP comprising an amino acid sequence of SEQ ID NO: 101-240, or a fusion protein, allelic variant, homolog, analog or derivative thereof. In a more preferred embodiment, the polypeptide is encoded by a nucleic acid molecule having a nucleotide sequence of SEQ ID NO: 1-100, or a part, allelic variant, substantially similar or hybridizing nucleic acid thereof.

[0454] Antibody, Agonist and Antagonist Administration

[0455] In another embodiment of the therapeutic methods of the present invention, a therapeutically effective amount of a pharmaceutical composition comprising an antibody (including fragment or derivative thereof) of the present invention is administered. As is well known, antibody compositions are administered, for example, to antagonize activity of OSP, or to target therapeutic agents to sites of OSP presence and/or accumulation. In a preferred embodiment, the antibody specifically binds to a OSP comprising an amino acid sequence of SEQ ID NO: 101-240, or a fusion protein, allelic variant, homolog, analog or derivative thereof. In a more preferred embodiment, the antibody specifically binds to a OSP encoded by a nucleic acid molecule having a nucleotide sequence of SEQ ID NO: 1-100, or a part, allelic variant, substantially similar or hybridizing nucleic acid thereof.

[0456] The present invention also provides methods for identifying modulators which bind to a OSP or have a modulatory effect on the expression or activity of a OSP. Modulators which decrease the expression or activity of OSP (antagonists) are believed to be useful in treating ovarian cancer. Such screening assays are known to those of skill in the art and include, without limitation, cell-based assays and cell-free assays. Small molecules predicted via computer imaging to specifically bind to regions of a OSP can also be designed, synthesized and tested for use in the imaging and treatment of ovarian cancer. Further, libraries of molecules can be screened for potential anticancer agents by assessing the ability of the molecule to bind to the OSPs identified herein. Molecules identified in the library as being capable of binding to a OSP are key candidates for further evaluation for use in the treatment of ovarian cancer. In a preferred embodiment, these molecules will downregulate expression and/or activity of a OSP in cells.

[0457] In another embodiment of the therapeutic methods of the present invention, a pharmaceutical composition comprising a non-antibody antagonist of OSP is administered. Antagonists of OSP can be produced using methods generally known in the art. In particular, purified OSP can be used to screen libraries of pharmaceutical agents, often combinatorial libraries of small molecules, to identify those that specifically bind and antagonize at least one activity of a OSP.

[0458] In other embodiments a pharmaceutical composition comprising an agonist of a OSP is administered. Agonists can be identified using methods analogous to those used to identify antagonists.

[0459] In a preferred embodiment, the antagonist or agonist specifically binds to and antagonizes or agonizes, respectively, a OSP comprising an amino acid sequence of SEQ ID NO: 101-240, or a fusion protein, allelic variant, homolog, analog or derivative thereof. In a more preferred embodiment, the antagonist or agonist specifically binds to and antagonizes or agonizes, respectively, a OSP encoded by a nucleic acid molecule having a nucleotide sequence of SEQ ID NO: 1-100, or a part, allelic variant, substantially similar or hybridizing nucleic acid thereof.

[0460] Targeting Ovarian Tissue

[0461] The invention also provides a method in which a polypeptide of the invention, or an antibody thereto, is linked to a therapeutic agent such that it can be delivered to the ovarian or to specific cells in the ovarian. In a preferred embodiment, an anti-OSP antibody is linked to a therapeutic agent and is administered to a patient in need of such therapeutic agent. The therapeutic agent may be a toxin, if ovarian tissue needs to be selectively destroyed. This would be useful for targeting and killing ovarian cancer cells. In another embodiment, the therapeutic agent may be a growth or differentiation factor, which would be useful for promoting ovarian cell function.

[0462] In another embodiment, an anti-OSP antibody may be linked to an imaging agent that can be detected using, e.g., magnetic resonance imaging, CT or PET. This would be useful for determining and monitoring ovarian function, identifying ovarian cancer tumors, and identifying noncancerous ovarian diseases.

### EXAMPLES

### Example 1a

### Alternative Splice Variants

[0463] We identified gene transcripts using the Gencarta™ tools from Compugen Ltd. (Tel Aviv, Israel). Gencarta™ was used to identify splice variant transcripts based on sequences from a variety of public and proprietary databases. These splice variants are either sequences which differ from a previously defined sequence or comprise new uses of known sequences. In general related variants are annotated as DEX0488_XXX.nt.1, DEX0488_XXX.nt.2, DEX0488_XXX.nt.3, etc. The variant DNA sequences encode proteins which differ from a previously defined protein sequence. In relation to the nucleotide sequence naming convention, protein variants are annotated as DEX0488_XXX.aa.1, DEX0488_XXX.aa.2, etc., wherein transcript DEX0488_XXX.nt.1 encodes protein DEX0488_XXX.aa.1. A single transcript may encode a protein from an alternate Open Reading Frame (ORF) which is designated DEX0488_XXX.orf.1. Additionally, multiple transcripts may encode for a single protein. In this case, DEX0488_XXX.nt.1 and DEX0488_XXX.nt.2 will both be associated with DEX0488_XXX.aa.1. The table below is organized to demonstrate associations between transcripts and proteins, specifically that nucleotide transcripts on the left (DEX0488_XXX.nt.1) encode for amino acid sequences on the right (DEX0488_XXX.aa.1).

[0464] The mapping of the nucleic acid (“NT”) SEQ ID NO; DEX ID; chromosomal location (if known); open reading frame (ORF) location; amino acid (“AA”) SEQ ID NO; AA DEX ID; are shown in the table below.

| SEQ | | | | SEQ | |
|---|---|---|---|---|---|
| ID | | | | ID | |
| NO | DEX ID | Chromo Map | ORF Loc | No | DEX ID |
| 1 | DEX0488_001.nt.1 | 20q13.12 | 1-1596 | 101 | DEX0488_001.aa.1 |
| 2 | DEX0488_001.nt.2 | 20q13.12 | 1-1998 | 102 | DEX0488_001.aa.2 |
| 2 | DEX0488_001.nt.2 | 20q13.12 | 75-2003 | 103 | DEX0488_001.orf.2 |
| 3 | DEX0488_001.nt.3 | 20q13.12 | 1-2679 | 104 | DEX0488_001.aa.3 |
| 3 | DEX0488_001.nt.3 | 20q13.12 | 1133-2683 | 105 | DEX0488_001.orf.3 |
| 4 | DEX0488_001.nt.4 | 20q13.12 | 1-1884 | 106 | DEX0488_001.aa.4 |
| 4 | DEX0488_001.nt.4 | 20q13.12 | 75-1889 | 107 | DEX0488_001.orf.4 |
| 5 | DEX0488_001.nt.5 | 20q13.12 | 498-2006 | 108 | DEX0488_001.aa.5 |
| 6 | DEX0488_001.nt.6 | 20q13.12 | 1-2514 | 109 | DEX0488_001.aa.6 |
| 6 | DEX0488_001.nt.6 | 20q13.12 | 959-2518 | 110 | DEX0488_001.orf.6 |
| 7 | DEX0488_001.nt.7 | 20q13.12 | 1-2421 | 111 | DEX0488_001.aa.7 |
| 7 | DEX0488_001.nt.7 | 20q13.12 | 75-2426 | 112 | DEX0488_001.orf.7 |
| 8 | DEX0488_001.nt.8 | 20q13.12 | 1-228 | 113 | DEX0488_001.aa.8 |
| 8 | DEX0488_001.nt.8 | 20q13.12 | 1-288 | 114 | DEX0488_001.orf.8 |
| 9 | DEX0488_001.nt.9 | 20q13.12 | 1-1380 | 115 | DEX0488_001.aa.9 |
| 9 | DEX0488_001.nt.9 | 20q13.12 | 75-1385 | 116 | DEX0488_001.orf.9 |
| 10 | DEX0488_001.nt.10 | 20q13.12 | 1-2748 | 117 | DEX0488_001.aa.10 |
| 10 | DEX0488_001.nt.10 | 20q13.12 | 75-2057 | 118 | DEX0488_001.orf.10 |
| 11 | DEX0488_001.nt.11 | 20q13.12 | 1-1854 | 119 | DEX0488_001.aa.11 |
| 11 | DEX0488_001.nt.11 | 20q13.12 | 75-1859 | 120 | DEX0488_001.orf.11 |
| 12 | DEX0488_002.nt.1 | 15q21.3 | 1-213 | 121 | DEX0488_002.aa.1 |
| 12 | DEX0488_002.nt.1 | 15q21.3 | 184-534 | 122 | DEX0488_002.orf.1 |
| 13 | DEX0488_003.nt.1 | 4p16.3 | 1-189 | 123 | DEX0488_003.aa.1 |
| 13 | DEX0488_003.nt.1 | 4p16.3 | 2-172 | 124 | DEX0488_003.orf.1 |
| 14 | DEX0488_003.nt.2 | 4p16.3 | 1-2907 | 125 | DEX0488_003.aa.2 |
| 14 | DEX0488_003.nt.2 | 4p16.3 | 1716-3227 | 126 | DEX0488_003.orf.2 |
| 15 | DEX0488_003.nt.3 | 4p16.3 | 1-2661 | 127 | DEX0488_003.aa.3 |
| 15 | DEX0488_003.nt.3 | 4p16.3 | 2081-3592 | 128 | DEX0488_003.orf.3 |
| 16 | DEX0488_003.nt.4 | 4p16.3 | 1-2661 | 129 | DEX0488_003.aa.4 |
| 16 | DEX0488_003.nt.4 | 4p16.3 | 1602-3113 | 130 | DEX0488_003.orf.4 |
| 17 | DEX0488_003.nt.5 | 4p16.3 | 1-2661 | 131 | DEX0488_003.aa.5 |
| 17 | DEX0488_003.nt.5 | 4p16.3 | 1790-3301 | 132 | DEX0488_003.orf.5 |
| 18 | DEX0488_003.nt.6 | 4p16.3 | 1-1413 | 133 | DEX0488_003.aa.6 |
| 18 | DEX0488_003.nt.6 | 4p16.3 | 2-1375 | 134 | DEX0488_003.orf.6 |
| 19 | DEX0488_003.nt.7 | 4p16.3 | 1-174 | 135 | DEX0488_003.aa.7 |
| 19 | DEX0488_003.nt.7 | 4p16.3 | 1-237 | 136 | DEX0488_003.orf.7 |
| 20 | DEX0488_004.nt.1 | 1 | 347-700 | 137 | DEX0488_004.aa.1 |
| 21 | DEX0488_005.nt.1 | 8q22.3 | 1-1599 | 138 | DEX0488_005.aa.1 |
| 21 | DEX0488_005.nt.1 | 8q22.3 | 218-2017 | 139 | DEX0488_005.orf.1 |
| 22 | DEX0488_006.nt.1 | 14q32.33 | 1-597 | 140 | DEX0488_006.aa.1 |
| 22 | DEX0488_006.nt.1 | 14q32.33 | 1228-1986 | 141 | DEX0488_006.orf.1 |
| 23 | DEX0488_007.nt.1 | 9q34.11 | 1-537 | 142 | DEX0488_007.aa.1 |
| 23 | DEX0488_007.nt.1 | 9q34.11 | 78-536 | 143 | DEX0488_007.orf.1 |
| 24 | DEX0488_008.nt.1 | 21q22.3 | 1-237 | 144 | DEX0488_008.aa.1 |
| 24 | DEX0488_008.nt.1 | 21q22.3 | 1-237 | 145 | DEX0488_008.orf.1 |
| 25 | DEX0488_008.nt.2 | 21q22.3 | 41-430 | 146 | DEX0488_008.aa.2 |
| 26 | DEX0488_008.nt.3 | 21q22.3 | 41-391 | 147 | DEX0488_008.aa.3 |
| 27 | DEX0488_009.nt.1 | 5q31.2 | 1-426 | 148 | DEX0488_009.aa.1 |
| 27 | DEX0488_009.nt.1 | 5q31.2 | 41-502 | 149 | DEX0488_009.orf.1 |
| 28 | DEX0488_010.nt.1 | 1p22.2 | 163-708 | 150 | DEX0488_010.aa.1 |
| 29 | DEX0488_011.nt.1 | 3q26.31 | 478-1686 | 151 | DEX0488_011.aa.1 |
| 30 | DEX0488_012.nt.1 | 12q24.13 | 1-141 | 152 | DEX0488_012.aa.1 |
| 30 | DEX0488_012.nt.1 | 12q24.13 | 325-567 | 153 | DEX0488_012.orf.1 |
| 31 | DEX0488_013.nt.1 | 16p12.2 | 1-621 | 154 | DEX0488_013.aa.1 |
| 31 | DEX0488_013.nt.1 | 16p12.2 | 346-942 | 155 | DEX0488_013.orf.1 |
| 32 | DEX0488_013.nt.2 | 16p12.2 | 1-525 | 156 | DEX0488_013.aa.2 |
| 32 | DEX0488_013.nt.2 | 16p12.2 | 346-831 | 157 | DEX0488_013.orf.2 |
| 33 | DEX0488_014.nt.1 | 1q42.12 | 79-462 | 158 | DEX0488_014.aa.1 |
| 34 | DEX0488_014.nt.2 | 1q42.12 | 79-363 | 159 | DEX0488_014.aa.2 |
| 35 | DEX0488_014.nt.3 | 1q42.12 | 1-1077 | 160 | DEX0488_014.aa.3 |
| 35 | DEX0488_014.nt.3 | 1q42.12 | 232-1080 | 161 | DEX0488_014.orf.3 |
| 36 | DEX0488_014.nt.4 | 1q42.12 | 172-3312 | 162 | DEX0488_014.aa.4 |
| 37 | DEX0488_015.nt.1 | 3q26.2 | 1-474 | 163 | DEX0488_015.aa.1 |
| 37 | DEX0488_015.nt.1 | 3q26.2 | 723-1751 | 164 | DEX0488_015.orf.1 |
| 38 | DEX0488_015.nt.2 | 3q26.2 | 1-474 | 163 | DEX0488_015.aa.1 |
| 38 | DEX0488_015.nt.2 | 3q26.2 | 565-1593 | 165 | DEX0488_015.orf.2 |
| 39 | DEX0488_016.nt.1 | 22q13.31 | 349-1017 | 166 | DEX0488_016.aa.1 |
| 40 | DEX0488_016.nt.2 | 22q13.31 | 1-669 | 166 | DEX0488_016.aa.1 |
| 41 | DEX0488_016.nt.3 | 22q13.31 | 1-1020 | 167 | DEX0488_016.aa.3 |
| 41 | DEX0488_016.nt.3 | 22q13.31 | 80-1021 | 168 | DEX0488_016.orf.3 |
| 42 | DEX0488_016.nt.4 | 22q13.31 | 1-669 | 166 | DEX0488_016.aa.1 |
| 43 | DEX0488_016.nt.5 | 22q13.31 | 1-669 | 166 | DEX0488_016.aa.1 |
| 44 | DEX0488_016.nt.6 | 22q13.31 | 1-669 | 166 | DEX0488_016.aa.1 |
| 45 | DEX0488_016.nt.7 | 22q13.31 | 1-669 | 166 | DEX0488_016.aa.1 |
| 46 | DEX0488_016.nt.8 | 22q13.31 | 349-1395 | 169 | DEX0488_016.aa.8 |
| 47 | DEX0488_016.nt.9 | 22q13.31 | 1-669 | 166 | DEX0488_016.aa.1 |
| 48 | DEX0488_016.nt.10 | 22q13.31 | 1-669 | 166 | DEX0488_016.aa.1 |
| 49 | DEX0488_016.nt.11 | 22q13.31 | 1-669 | 166 | DEX0488_016.aa.1 |
| 50 | DEX0488_017.nt.1 | 14q32.33 | 1-267 | 170 | DEX0488_017.aa.1 |
| 50 | DEX0488_017.nt.1 | 14q32.33 | 98-238 | 171 | DEX0488_017.orf.1 |
| 51 | DEX0488_018.nt.1 | 16p13.3 | 1-336 | 172 | DEX0488_018.aa.1 |
| 51 | DEX0488_018.nt.1 | 16p13.3 | 699-1136 | 173 | DEX0488_018.orf.1 |
| 52 | DEX0488_018.nt.2 | 16p13.3 | 1-1521 | 174 | DEX0488_018.aa.2 |
| 52 | DEX0488_018.nt.2 | 16p13.3 | 434-1438 | 175 | DEX0488_018.orf.2 |
| 53 | DEX0488_018.nt.3 | 16p13.3 | 1-336 | 172 | DEX0488_018.aa.1 |
| 53 | DEX0488_018.nt.3 | 16p13.3 | 802-1239 | 176 | DEX0488_018.orf.3 |
| 54 | DEX0488_018.nt.4 | 16p13.3 | 1-1539 | 177 | DEX0488_018.aa.4 |
| 54 | DEX0488_018.nt.4 | 16p13.3 | 434-1438 | 178 | DEX0488_018.orf.4 |
| 55 | DEX0488_018.nt.5 | 16p13.3 | 1-336 | 172 | DEX0488_018.aa.1 |
| 55 | DEX0488_018.nt.5 | 16p13.3 | 771-1208 | 179 | DEX0488_018.orf.5 |
| 56 | DEX0488_018.nt.6 | 16p13.3 | 1-336 | 172 | DEX0488_018.aa.1 |
| 56 | DEX0488_018.nt.6 | 16p13.3 | 730-1167 | 180 | DEX0488_018.orf.6 |
| 57 | DEX0488_018.nt.7 | 16p13.3 | 1-336 | 172 | DEX0488_018.aa.1 |
| 57 | DEX0488_018.nt.7 | 16p13.3 | 921-1358 | 181 | DEX0488_018.orf.7 |
| 58 | DEX0488_018.nt.8 | 16p13.3 | 1-822 | 182 | DEX0488_018.aa.8 |
| 58 | DEX0488_018.nt.8 | 16p13.3 | 179-823 | 183 | DEX0488_018.orf.8 |
| 59 | DEX0488_019.nt.1 | 16p12.2 | 1-2133 | 184 | DEX0488_019.aa.1 |
| 59 | DEX0488_019.nt.1 | 16p12.2 | 1-1803 | 185 | DEX0488_019.orf.1 |
| 60 | DEX0488_019.nt.2 | 16p12.2 | 1-258 | 186 | DEX0488_019.aa.2 |
| 60 | DEX0488_019.nt.2 | 16p12.2 | 1-486 | 187 | DEX0488_019.orf.2 |
| 61 | DEX0488_019.nt.3 | 16p12.2 | 112-1437 | 188 | DEX0488_019.aa.3 |
| 62 | DEX0488_019.nt.4 | 16p12.2 | 1-219 | 189 | DEX0488_019.aa.4 |
| 62 | DEX0488_019.nt.4 | 16p12.2 | 3-476 | 190 | DEX0488_019.orf.4 |
| 63 | DEX0488_019.nt.5 | 16p12.2 | 620-961 | 191 | DEX0488_019.aa.5 |
| 64 | DEX0488_019.nt.6 | 16p12.2 | 1-1326 | 188 | DEX0488_019.aa.3 |
| 65 | DEX0488_019.nt.7 | 16p12.2 | 1-171 | 192 | DEX0488_019.aa.7 |
| 65 | DEX0488_019.nt.7 | 16p12.2 | 44-469 | 193 | DEX0488_019.orf.7 |
| 66 | DEX0488_019.nt.8 | 16p12.2 | 139-1758 | 194 | DEX0488_019.aa.8 |
| 67 | DEX0488_020.nt.1 | 7p21.1 | 34-405 | 195 | DEX0488_020.aa.1 |
| 68 | DEX0488_021.nt.1 | 12q24.13 | 1-633 | 196 | DEX0488_021.aa.1 |
| 68 | DEX0488_021.nt.1 | 12q24.13 | 76-807 | 197 | DEX0488_021.orf.1 |
| 69 | DEX0488_021.nt.2 | 12q24.13 | 1-252 | 198 | DEX0488_021.aa.2 |
| 69 | DEX0488_021.nt.2 | 12q24.13 | 1973-2341 | 199 | DEX0488_021.orf.2 |
| 70 | DEX0488_022.nt.1 | 17q11.2 | 1-111 | 200 | DEX0488_022.aa.1 |
| 70 | DEX0488_022.nt.1 | 17q11.2 | 46-297 | 201 | DEX0488_022.orf.1 |
| 71 | DEX0488_022.nt.2 | 17q11.2 | 493-1356 | 202 | DEX0488_022.aa.2 |
| 72 | DEX0488_022.nt.3 | 17q11.2 | 493-1155 | 203 | DEX0488_022.aa.3 |
| 73 | DEX0488_022.nt.4 | 17q11.2 | 1-864 | 202 | DEX0488_022.aa.2 |
| 74 | DEX0488_022.nt.5 | 17q11.2 | 493-1230 | 204 | DEX0488_022.aa.5 |
| 75 | DEX0488_022.nt.6 | 17q11.2 | 803-1225 | 205 | DEX0488_022.aa.6 |
| 76 | DEX0488_022.nt.7 | 17q11.2 | 493-771 | 206 | DEX0488_022.aa.7 |
| 77 | DEX0488_022.nt.8 | 17q11.2 | 1-198 | 207 | DEX0488_022.aa.8 |
| 77 | DEX0488_022.nt.8 | 17q11.2 | 81-344 | 208 | DEX0488_022.orf.8 |
| 78 | DEX0488_023.nt.1 | 8q11.21 | 1-576 | 209 | DEX0488_023.aa.1 |
| 79 | DEX0488_023.nt.2 | 8q11.21 | 1-285 | 210 | DEX0488_023.aa.2 |
| 79 | DEX0488_023.nt.2 | 8q11.21 | 845-1153 | 211 | DEX0488_023.orf.2 |
| 80 | DEX0488_024.nt.1 | 17p11.2 | 1-948 | 212 | DEX0488_024.aa.1 |
| 80 | DEX0488_024.nt.1 | 17p11.2 | 1465-2010 | 213 | DEX0488_024.orf.1 |
| 81 | DEX0488_024.nt.2 | 17p11.2 | 798-1220 | 214 | DEX0488_024.aa.2 |
| 82 | DEX0488_025.nt.1 | 17p13.1 | 1-2373 | 215 | DEX0488_025.aa.1 |
| 82 | DEX0488_025.nt.1 | 17p13.1 | 243-2420 | 216 | DEX0488_025.orf.1 |
| 83 | DEX0488_025.nt.2 | 17p13.1 | 69-332 | 217 | DEX0488_025.aa.2 |
| 84 | DEX0488_026.nt.1 | 19p13.2 | 1-966 | 218 | DEX0488_026.aa.1 |
| 84 | DEX0488_026.nt.1 | 19p13.2 | 285-1319 | 219 | DEX0488_026.orf.1 |
| 85 | DEX0488_027.nt.1 | 9q34.11 | 1-834 | 220 | DEX0488_027.aa.1 |
| 86 | DEX0488_027.nt.2 | 9q34.11 | 3-308 | 221 | DEX0488_027.aa.2 |
| 87 | DEX0488_027.nt.3 | 9q34.11 | 3-269 | 222 | DEX0488_027.aa.3 |
| 88 | DEX0488_027.nt.4 | 9q34.11 | 1-246 | 223 | DEX0488_027.aa.4 |
| 88 | DEX0488_027.nt.4 | 9q34.11 | 82-327 | 224 | DEX0488_027.orf.4 |
| 89 | DEX0488_028.nt.1 | 19p13.2 | 1-1188 | 225 | DEX0488_028.aa.1 |
| 89 | DEX0488_028.nt.1 | 19p13.2 | 143-1510 | 226 | DEX0488_028.orf.1 |
| 90 | DEX0488_029.nt.1 | 17q25.3 | 1-330 | 227 | DEX0488_029.aa.1 |
| 90 | DEX0488_029.nt.1 | 17q25.3 | 3-341 | 228 | DEX0488_029.orf.1 |
| 91 | DEX0488_030.nt.1 | 19q13.2 | 9-413 | 229 | DEX0488_030.aa.1 |
| 92 | DEX0488_031.nt.1 | 6q25.3 | 1-4770 | 230 | DEX0488_031.aa.1 |
| 92 | DEX0488_031.nt.1 | 6q25.3 | 3-3326 | 231 | DEX0488_031.orf.1 |
| 93 | DEX0488_032.nt.1 | 20q13.32 | 1-309 | 232 | DEX0488_032.aa.1 |
| 94 | DEX0488_033.nt.1 | 1p35.1 | 623-1075 | 233 | DEX0488_033.aa.1 |
| 95 | DEX0488_033.nt.2 | 1p35.1 | 1-1053 | 234 | DEX0488_033.aa.2 |
| 95 | DEX0488_033.nt.2 | 1p35.1 | 306-1208 | 235 | DEX0488_033.orf.2 |
| 96 | DEX0488_034.nt.1 | 13q14.11 | 80-676 | 236 | DEX0488_034.aa.1 |
| 97 | DEX0488_035.nt.1 | 5q11.2 | 1-2283 | 237 | DEX0488_035.aa.1 |
| 98 | DEX0488_035.nt.2 | 5q11.2 | 1-2256 | 238 | DEX0488_035.aa.2 |
| 99 | DEX0488_036.nt.1 | 2q14.2 | 135-1331 | 239 | DEX0488_036.aa.1 |
| 100 | DEX0488_036.nt.2 | 2q14.2 | 135-1433 | 240 | DEX0488_036.aa.2 |

[0465] The polypeptides of the present invention were analyzed and the following attributes were identified; specifically, epitopes, post translational modifications, signal peptides and transmembrane domains. Antigenicity (Epitope) prediction was performed through the antigenic module in the EMBOSS package. Rice, P., EMBOSS: The European Molecular Biology Open Software Suite, Trends in Genetics 16(6): 276-277 (2000). The antigenic module predicts potentially antigenic regions of a protein sequence, using the method of Kolaskar and Tongaonkar. Kolaskar, A S and Tongaonkar, P C., A semi-empirical method for prediction of antigenic determinants on protein antigens, FEBS Letters 276: 172-174 (1990). Examples of post-translational modifications (PTMs) and other motifs of the OSPs of this invention are listed below. In addition, antibodies that specifically bind such post-translational modifications may be useful as a diagnostic or as therapeutic. The PTMs and other motifs were predicted by using the ProSite Dictionary of Proteins Sites and Patterns (Bairoch et al., Nucleic Acids Res. 25(1):217-221 (1997)), the following motifs, including PTMs, were predicted for the OSPs of the invention. The signal peptides were detected by using the SignalP 2.0, see Nielsen et al., Protein Engineering 12, 3-9 (1999). Prediction of transmembrane helices in proteins was performed by the application TMHMM 2.0, “currently the best performing transmembrane prediction program”, according to authors (Krogh et al., Journal of Molecular Biology, 305(3):567-580, (2001); Moller et al., Bioinformatics, 17(7):646-653, (2001); Sonnhammer, et al., A hidden Markov model for predicting transmembrane helices in protein sequences in Glasgow, et al. Ed. Proceedings of the Sixth International Conference on Intelligent Systems for Molecular Biology, pages 175-182, Menlo Park, Calif., 1998. AAAI Press. The PSORT II program may also be used to predict cellular localizations. Horton et al., Intelligent Systems for Molecular Biology 5: 147-152 (1997). The table below includes the following sequence annotations: Signal peptide presence; TM (number of membrane domain, topology in orientation and position); Amino acid location and antigenic index (location, AI score); PTM and other motifs (type, amino acid residue locations); and functional domains (type, amino acid residue locations).

| DEX ID | Sig P | TMHMM | Antigenicity | PTM | Domains |
|---|---|---|---|---|---|
| DEX0488_{—} | N | 0 - | 211-248, | PKC_PHOSPHO_SITE | sp_Q9H4Z1_Q9H4Z1_HUMAN |
| 001.aa.1 | | o1-532; | 1.173; | 98-100; | 55-96; |
| | | | 169-178, | PKC_PHOSPHO_SITE | sp_Q9H4Z1_Q9H4Z1_HUMAN |
| | | | 1.171; | 206-208; | 113-154; |
| | | | 17-45, 1.155; | PKC_PHOSPHO_SITE | sp_Q9H4Z1_Q9H4Z1_HUMAN |
| | | | 329-350, | 303-305; | 172-213; |
| | | | 1.152; | PKC_PHOSPHO_SITE | PRICHEXTENSN 29-41; |
| | | | 513-529, | 401-403; | PRICHEXTENSN |
| | | | 1.152; | PKC_PHOSPHO_SITE | 277-302; |
| | | | 52-60, 1.144; | 408-410; | PRICHEXTENSN 313-325; |
| | | | 286-303, | PKC_PHOSPHO_SITE | MATRIXIN 223-248; |
| | | | 1.137; | 444-446; | MATRIXIN 256-269; |
| | | | 111-128, | PKC_PHOSPHO_SITE | FNTYPEII 169-178; |
| | | | 1.131; | 453-455; | FNTYPEII 180-192; |
| | | | 401-424, | PKC_PHOSPHO_SITE | FNTYPEII 197-212; |
| | | | 1.112; | 508-510; | fn2 55-96; |
| | | | 151-157, | CK2_PHOSPHO_SITE | fn2 113-154; fn2 |
| | | | 1.102; | 156-159; | 172-213; PT 297-332; |
| | | | 428-441, | CK2_PHOSPHO_SITE | hemopexin |
| | | | 1.099; | 167-170; | 346-390; hemopexin |
| | | | 93-100, 1.089; | CK2_PHOSPHO_SITE | 392-433; hemopexin |
| | | | 480-492, | 202-205; | 438-484; hemopexin |
| | | | 1.085; | CK2_PHOSPHO_SITE | 486-529; ZnMc 147-270; |
| | | | 354-361, 1.08; | 238-241; | HX 346-390; |
| | | | 494-502, | CK2_PHOSPHO_SITE | HX 392-433; HX |
| | | | 1.077; | 335-338; | 438-484; HX 486-529; |
| | | | 377-399 | CK2 PHOSPHO SITE | FN2 48-96; |
| | | | 1.073; | 394-397; | FN2 106-154; FN2 |
| | | | 263-270, | CK2_PHOSPHO_SITE | 165-213; PRO_RICH |
| | | | 1.068; | 471-474; | 270-336; |
| | | | 459-470, | CK2_PHOSPHO_SITE | FIBRONECTIN_2 55-96; |
| | | | 1.067; | 473-476; | FIBRONECTIN_2 |
| | | | 253-259, | CK2_PHOSPHO_SITE | 113-154; |
| | | | 1.066; | 509-512; | FIBRONECTIN_2 172-213; |
| | | | 504-510, | MYRISTYL 48-53; | HEMOPEXIN |
| | | | 1.061; 9-15, | MYRISTYL | 381-396; |
| | | | 1.05; 136-142, | 77-82; | ZINC_PROTEASE 223-232; |
| | | | 1.042; | MYRISTYL 106-111; | |
| | | | 449-454, | MYRISTYL | |
| | | | 1.033; | 121-126; | |
| | | | | MYRISTYL 164-169; | |
| | | | | MYRISTYL | |
| | | | | 165-170; | |
| | | | | MYRISTYL 233-238; | |
| | | | | MYRISTYL | |
| | | | | 432-437; | |
| | | | | MYRISTYL 440-445; | |
| | | | | AMIDATION | |
| | | | | 453-456; RGD | |
| | | | | 191-193; | |
| DEX0488_{—} | N | 0 - | 104-121, | ASN_GLYCOSYLATION | sp_Q9H4Z1_Q9H4Z1_HUMAN |
| 001.aa.2 | | o1-666; | 1.307; | 138-141; | 330-371; |
| | | | 43-78, 1.175; | ASN_GLYCOSYLATION | sp_Q9H4Z1_Q9H4Z1_HUMAN |
| | | | 486-523, | 220-223; | 388-429; |
| | | | 1.173; | ASN_GLYCOSYLATION | sp_Q9H4Z1_Q9H4Z1_HUMAN |
| | | | 444-453, | 227-230; | 447-488; |
| | | | 1.171; | PKC_PHOSPHO_SITE | PRICHEXTENSN 546-562; |
| | | | 167-181, | 31-33; | PRICHEXTENSN |
| | | | 1.163; | PKC_PHOSPHO_SITE | 570-582; |
| | | | 311-320, | 55-57; | PRICHEXTENSN 585-606; |
| | | | 1.155; | PKC_PHOSPHO_SITE | MATRIXIN 194-207; |
| | | | 604-625, | 70-72; | MATRIXIN 241-256; |
| | | | 1.152; | PKC_PHOSPHO_SITE | MATRIXIN 264-292; |
| | | | 264-275, 1.15; | 140-142; | MATRIXIN 498-523; |
| | | | 327-335, | PKC_PHOSPHO_SITE | MATRIXIN 531-544; |
| | | | 1.144; | 190-192; | FNTYPEII 444-453; |
| | | | 561-578, | PKC_PHOSPHO_SITE | FNTYPEII 455-467; |
| | | | 1.137; | 196-198; | FNTYPEII 472-487; |
| | | | 126-133, | PKC_PHOSPHO_SITE | fn2 330-371; |
| | | | 1.137; | 373-375; | fn2 388-429; fn2 |
| | | | 629-645, | PKC_PHOSPHO_SITE | 447-488; PT 572-607; |
| | | | 1.131; | 481-483; | Peptidase_M10 |
| | | | 386-403, | PKC_PHOSPHO_SITE | 209-315; |
| | | | 1.131; | 578-580; | Peptidase_M10_N |
| | | | 286-296, | PKC_PHOSPHO_SITE | 126-203; ZnMC 212-545; |
| | | | 1.127; | 652-654; | FN2 323-371; |
| | | | 10-26, 1.119; | PKC_PHOSPHO_SITE | FN2 381-429; FN2 |
| | | | 242-262, | 658-660; | 440-488; PRO_RICH |
| | | | 1.108; | CK2_PHOSPHO_SITE | 545-611; |
| | | | 198-205, | 85-88; | FIBRONECTIN_2 330-371; |
| | | | 1.103; | CK2_PHOSPHO_SITE | FIBRONECTIN_2 |
| | | | 426-432, | 179-182; | 388-429; |
| | | | 1.102; | CK2_PHOSPHO_SITE | FIBRONECTIN_2 447-488; |
| | | | 233-239, | 431-434; | ZINC_PROTEASE |
| | | | 1.093; | CK2 PHOSPHO SITE | 498-507; |
| | | | 145-157, | 442-445; | CYSTEINE_SWITCH |
| | | | 1.092; | CK2_PHOSPHO_SITE | 197-204; |
| | | | 368-375, | 477-480; | |
| | | | 1.089; | CK2_PHOSPHO_SITE | |
| | | | 538-545, | 513-516; | |
| | | | 1.068; | CK2_PHOSPHO_SITE | |
| | | | 528-534, | 610-613; | |
| | | | 1.066; | CK2_PHOSPHO_SITE | |
| | | | 92-98, 1.06; | 650-653; | |
| | | | 34-39, 1.053; | TYR_PHOSPHO_SITE | |
| | | | 215-226, | 142-150; | |
| | | | 1.045; | MYRISTYL 5-10; | |
| | | | 411-417, | MYRISTYL | |
| | | | 1.042; | 115-120; | |
| | | | | MYRISTYL 323-328; | |
| | | | | MYRISTYL | |
| | | | | 352-357; | |
| | | | | MYRISTYL 381-386; | |
| | | | | MYRISTYL | |
| | | | | 396-401; | |
| | | | | MYRISTYL 439-444; | |
| | | | | MYRISTYL | |
| | | | | 440-445; | |
| | | | | MYRISTYL 508-513; | |
| | | | | MYRISTYL | |
| | | | | 637-642; | |
| | | | | MYRISTYL 641-646; | |
| | | | | RGD 466-468; | |
| DEX0488_{—} | N | 1 - | 81-98, 1.307; | ASN_GLYCOSYLATION | sp_Q9H4Z1_Q9H4Z1_HUMAN |
| 001.orf.2 | | i1-75; | 20-55, 1.175; | 115-118; | 307-348; |
| | | tm 76-98; | 463-500, | ASN_GLYCOSYLATION | sp_Q9H4Z1_Q9H4Z1_HUMAN |
| | | o99-643; | 1.173; | 197-200; | 365-406; |
| | | | 421-430, | ASN_GLYCOSYLATION | sp_Q9H4Z1_Q9H4Z1_HUMAN |
| | | | 1.171; | 204-207; | 424-465; |
| | | | 144-158, | PKC_PHOSPHO_SITE | PRICHEXTENSN 523-539; |
| | | | 1.163; | 5-7; | PRICHEXTENSN |
| | | | 288-297, | PKC_PHOSPHO_SITE | 547-559; |
| | | | 1.155; | 8-10; | PRICHEXTENSN 562-583; |
| | | | 581-602, | PKC_PHOSPHO_SITE | MATRIXIN 171-184; |
| | | | 1.152; | 32-34; | MATRIXIN 218-233; |
| | | | 241-252, 1.15; | PKC_PHOSPHO_SITE | MATRIXIN 241-269; |
| | | | 304-312, | 47-49; | MATRIXIN 475-500; |
| | | | 1.144; | PKC_PHOSPHO_SITE | MATRIXIN 508-521; |
| | | | 538-555, | 117-119; | FNTYPEII 421-430; |
| | | | 1.137; | PKC_PHOSPHO_SITE | FNTYPEII 432-444; |
| | | | 103-110, | 167-169; | FNTYPEII 449-464; |
| | | | 1.137; | PKC_PHOSPHO_SITE | fn2 307-348; |
| | | | 606-622, | 173-175; | fn2 365-406; fn2 |
| | | | 1.131; | PKC_PHOSPHO_SITE | 424-465; PT 549-584; |
| | | | 363-380, | 350-352; | 584; Peptidase_M10 |
| | | | 1.131; | PKC_PHOSPHO_SITE | 186-292; |
| | | | 263-273, | 458-460; | Peptidase_M10_N |
| | | | 1.127; | PKC_PHOSPHO_SITE | 103-180; ZnMc 189-522; |
| | | | 219-239, | 555-557; | FN2 300-348; |
| | | | 1.108; | PKC_PHOSPHO_SITE | FN2 358-406; FN2 |
| | | | 175-182, | 629-631; | 417-465; PRO_RICH |
| | | | 1.103; | PKC_PHOSPHO_SITE | 522-588; |
| | | | 403-409, | 635-637; | FIBRONECTIN 2 307-348, |
| | | | 1.102; | CK2_PHOSPHO_SITE | FIBRONECTIN_2 |
| | | | 210-216, | 3-6; | 365-406; |
| | | | 1.093; | CK2_PHOSPHO_SITE | FIBRONECTIN_2 424-465; |
| | | | 122-134, | 62-65; | ZINC_PROTEASE |
| | | | 1.092; | CK2_PHOSPHO_SITE | 475-484; |
| | | | 345-352, | 156-159; | CYSTEINE_SWITCH |
| | | | 1.089; | CK2_PHOSPHO_SITE | 174-181; |
| | | | 515-522, | 408-411; | |
| | | | 1.068; | CK2_PHOSPHO_SITE | |
| | | | 505-511, | 419-422; | |
| | | | 1.066; | CK2_PHOSPHO_SITE | |
| | | | 69-75, 1.06; | 454-457; | |
| | | | 11-16, 1.053; | CK2_PHOSPHO_SITE | |
| | | | 192-203, | 490-493; | |
| | | | 1.045; | CK2_PHOSPHO_SITE | |
| | | | 388-394, | 587-590; | |
| | | | 1.042; | CK2_PHOSPHO_SITE | |
| | | | | 627-630; | |
| | | | | TYR_PHOSPHO_SITE | |
| | | | | 119-127; | |
| | | | | MYRISTYL 92-97; | |
| | | | | MYRISTYL | |
| | | | | 300-305; | |
| | | | | MYRISTYL 329-334; | |
| | | | | MYRISTYL | |
| | | | | 358-363; | |
| | | | | MYRISTYL 373-378; | |
| | | | | MYRISTYL | |
| | | | | 416-421; | |
| | | | | MYRISTYL 417-422; | |
| | | | | MYRISTYL | |
| | | | | 485-490; | |
| | | | | MYRISTYL 614-619; | |
| | | | | MYRISTYL | |
| | | | | 618-623; RGD | |
| | | | | 443-445; | |
| DEX0488_{—} | N | 0 - | 104-121, | ASN_GLYCOSYLATION | sp_Q9H4Z1_Q9H4Z1_HUMAN |
| 001.a.a.3 | | o1-893; | 1.307; | 138-141; | 330-371; |
| | | | 440-462, | ASN_GLYCOSYLATION | sp_Q9H4Z1_Q9H4Z1_HUMAN |
| | | | 1.216; | 220-223; | 474-515; |
| | | | 43-78, 1.175; | ASN_GLYCOSYLATION | sp_Q9H4Z1_Q9H4Z1_HUMAN |
| | | | 572-609, | 227-230; | 533-574; |
| | | | 1.173; | ASN_GLYCOSYLATION | PRICHEXTENSN 632-648; |
| | | | 530-539, | 396-399; | PRICHEXTENSN |
| | | | 1.171; | ASN_GLYCOSYLATION | 656-668; |
| | | | 167-181, | 437-440; | PRICHEXTENSN 671-692; |
| | | | 1.163; | PKC_PHOSPHO_SITE | MATRIXIN 194-207; |
| | | | 311-320, | 31-33; | MATRIXIN 241-256; |
| | | | 1.155; | PKC_PHOSPHO_SITE | MATRIXIN 264-292; |
| | | | 690-711, | 55-57; | FNTYPEII 530-539; |
| | | | 1.152; | PKC_PHOSPHO_SITE | FNTYPEII 541-553; |
| | | | 874-890, | 70-72; | FNTYPEII 558-573; |
| | | | 1.152; | PKC_PHOSPHO_SITE | fn2 330-371; |
| | | | 264-275, 1.15; | 140-142; | fn2 474-515; fn2 |
| | | | 327-335, | PKC_PHOSPHO_SITE | 533-574; PT 658-693; |
| | | | 1.144; | 190-192; | Peptidase_M10 |
| | | | 647-664, | PKC_PHOSPHO_SITE | 209-315; |
| | | | 1.137; | 196-198; | Peptidase_M10_N |
| | | | 126-133, | PKC PHOSPHO SITE | 126-203; hemopexin |
| | | | 1.137; | 567-569; | 707-751; hemopexin |
| | | | 472-489, | PKC_PHOSPHO_SITE | 753-794; hemopexin |
| | | | 1.131; | 664-666; | 799-845; hemopexin |
| | | | 387-395, | PKC_PHOSPHO_SITE | 847-890; ZnMc 212-631; |
| | | | 1.129; | 762-764; | HX 707-751; |
| | | | 286-296, | PKC_PHOSPHO_SITE | HX 753-794; HX |
| | | | 1.127; | 769-771; | 799-845; HX 847-890; |
| | | | 10-26, 1.119; | PKC_PHOSPHO_SITE | FN2 323-371; |
| | | | 762-785, | 805-807; | FN2 467-515; FN2 |
| | | | 1.112; | PKC_PHOSPHO_SITE | 526-574; PRO_RICH |
| | | | 400-419, | 814-816; | 631-697; |
| | | | 1.109; | PKC_PHOSPHO_SITE | FIBRONECTIN_2 330-371; |
| | | | 242-262, | 869-871; | FIBRONECTIN_2 |
| | | | 1.108; | CK2_PHOSPHO_SITE | 474-515; |
| | | | 198-205, | 85-88; | FIBRONECTIN_2 533-574; |
| | | | 1.103; | CK2_PHOSPHO_SITE | HEMOPEXIN |
| | | | 512-518, | 179-182; | 742-757; |
| | | | 1.102; | CK2_PHOSPHO_SITE | ZINC_PROTEASE 584-593; |
| | | | 789-802, | 373-376; | |
| | | | 1.099; | CK2_PHOSPHO_SITE | CYSTEINE_SWITCH |
| | | | 233-239, | 517-520; | 197-204; |
| | | | 1.093; | CK2_PHOSPHO_SITE | |
| | | | 145-157, | 528-531; | |
| | | | 1.092; | CK2_PHOSPHO_SITE | |
| | | | 841-853, | 563-566; | |
| | | | 1.085; | CK2_PHOSPHO_SITE | |
| | | | 715-722, 1.08; | 599-602; | |
| | | | 855-863, | CK2_PHOSPHO_SITE | |
| | | | 1.077; | 696-699; | |
| | | | 738-760, | CK2_PHOSPHO_SITE | |
| | | | 1.073; | 755-758; | |
| | | | 624-631, | CK2_PHOSPHO_SITE | |
| | | | 1.068; | 832-835; | |
| | | | 820-831, | CK2_PHOSPHO_SITE | |
| | | | 1.067; | 834-837; | |
| | | | 614-620, | CK2_PHOSPHO_SITE | |
| | | | 1.066; | 870-873; | |
| | | | 368-374, | TYR_PHOSPHO_SITE | |
| | | | 1.065; | 142-150; | |
| | | | 865-871, | MYRISTYL 5-10; | |
| | | | 1.061; | MYRISTYL | |
| | | | 92-98, 1.06; | 115-120; | |
| | | | 34-39, 1.053; | MYRISTYL 323-328; | |
| | | | 215-226, | MYRISTYL | |
| | | | 1.045; | 352-357; | |
| | | | 497-503, | MYRISTYL 379-384; | |
| | | | 1.042; | MYRISTYL | |
| | | | 810-815, | 394-399; | |
| | | | 1.033; | MYRISTYL 442-447; | |
| | | | | MYRISTYL | |
| | | | | 467-472; | |
| | | | | MYRISTYL 482-487, | |
| | | | | MYRISTYL | |
| | | | | 525-530; | |
| | | | | MYRISTYL 526-531; | |
| | | | | MYRISTYL | |
| | | | | 594-599; | |
| | | | | MYRISTYL 793-789 | |
| | | | | MYRISTYL | |
| | | | | 801-806; | |
| | | | | AMIDATION | |
| | | | | 814-817; RGD | |
| | | | | 552-554; | |
| DEX0488_{—} | N | 0 - | 64-86, 1.216; | ASN_GLYCOSYLATION | sp_Q9H4Z1_Q9H4Z1_HUMAN |
| 001.orf.3 | | o1-517; | 196-233, | 20-23; | 98-139; |
| | | | 1.173; | ASN_GLYCOSYLATION | sp_Q9H4Z1_Q9H4Z1_HUMAN |
| | | | 154-163, | 61-64; | 157-198; |
| | | | 1.171; | PKC_PHOSPHO_SITE | PRICHEXTENSN 256-272; |
| | | | 314-335, | 191-193; | PRICHEXTENSN |
| | | | 1.152; | PKC_PHOSPHO_SITE | 280-292; |
| | | | 498-514, | 288-290; | PRICHEXTENSN 295-316; |
| | | | 1.152; | PKC_PHOSPHO_SITE | MATRIXIN 208-233; |
| | | | 271-288, | 386-388, | MATRIXIN 241-254; |
| | | | 1.137; | PKC_PHOSPHO_SITE | FNTYPEII 154-163; |
| | | | 96-113, 1.131; | 393-395; | FNTYPEII 165-177; |
| | | | 11-19, 1.129; | PKC_PHOSPHO_SITE | FNTYPEII 182-197; |
| | | | 386-409, | 429-431; | fn2 98-139; |
| | | | 1.112; | PKC_PHOSPHO_SITE | fn2 157-198; PT |
| | | | 24-43, 1.109; | 438-440; | 282-317; hemopexin |
| | | | 136-142, | PKC_PHOSPHO_SITE | 331-375; hemopexin |
| | | | 1.102; | 493-495; | 377-418; hemopexin |
| | | | 413-426, | CK2_PHOSPHO_SITE | 423-469; hemopexin |
| | | | 1.099; | 141-144; | 471-514; ZnMc 132-255; |
| | | | 465-477, | CK2_PHOSPHO_SITE | HX 331-375; |
| | | | 1.085; | 152-155; | HX 377-418; HX |
| | | | 339-346, 1.08; | CK2_PHOSPHO_SITE | 423-469; HX 471-514; |
| | | | 479-487, | 187-190; | FN2 91-139; |
| | | | 1.077; | CK2_PHOSPHO_SITE | FN2 150-198; |
| | | | 362-384, | 223-226; | PRO_RICH 255-321; |
| | | | 1.073; | CK2_PHOSPHO_SITE | FIBRONECTIN_2 98-139; |
| | | | 248-255, | 320-323; | FIBRONECTIN_2 |
| | | | 1.068; | CK2_PHOSPHO_SITE | 157-198; HEMOPEXIN |
| | | | 444-455, | 379-382; | 366-381; |
| | | | 1.067; | CK2_PHOSPHO_SITE | ZINC_PROTEASE 208-217; |
| | | | 238-244, | 456-459; | |
| | | | 1.066; | CK2_PHOSPHO_SITE | |
| | | | 489-495, | 458-461; | |
| | | | 1.061; | CK2_PHOSPHO_SITE | |
| | | | 121-127, | 494-497; | |
| | | | 1.042; | MYRISTYL 3-8; | |
| | | | 434-439, | MYRISTYL 18-23; | |
| | | | 1.033; | MYRISTYL | |
| | | | | 66-71; | |
| | | | | MYRISTYL 91-96; | |
| | | | | MYRISTYL | |
| | | | | 106-111; | |
| | | | | MYRISTYL 149-154; | |
| | | | | MYRISTYL | |
| | | | | 150-155; | |
| | | | | MYRISTYL 218-223; | |
| | | | | MYRISTYL | |
| | | | | 417-422; | |
| | | | | MYRISTYL 425-430; | |
| | | | | AMIDATION | |
| | | | | 438-441; RGD | |
| | | | | 176-178; | |
| DEX0488_{—} | N | 0 - | 104-121, | ASN_GLYCOSYLATION | sp_Q9H4Z1_Q9H4Z1_HUMAN |
| 001.aa.4 | | o1-628; | 1.307; | 138-141; | 330-371; |
| | | | 604-621, | ASN_GLYCOSYLATION | sp_Q9H4Z1_Q9H4Z1_HUMAN |
| | | | 1.202; | 220-223; | 388-429; |
| | | | 43-78, 1.175; | ASN_GLYCOSYLATION | sp_Q9H4Z1_Q9H4Z1_HUMAN |
| | | | 486-523, | 227-230; | 447-488; |
| | | | 1.173; | PKC_PHOSPHO_SITE | PRICHEXTENSN 546-562; |
| | | | 444-453, | 31-33; | PRICHEXTENSN |
| | | | 1.171; | PKC_PHOSPHO_SITE | 570-582; |
| | | | 167-181, | 55-57; | PRICHEXTENSN 585-606; |
| | | | 1.163; | PKC_PHOSPHO_SITE | MATRIXIN 194-207; |
| | | | 311-320, | 70-72; | MATRIXIN 241-256; |
| | | | 1.155; | PKC_PHOSPHO_SITE | MATRIXIN 264-292; |
| | | | 264-275, 1.15; | 140-142; | MATRIXIN 498-523; |
| | | | 327-335, | PKC_PHOSPHO_SITE | MATRIXIN 531-544; |
| | | | 1.144; | 190-192; | FNTYPEII 444-453; |
| | | | 561-578, | PKC_PHOSPHO_SITE | FNTYPEII 455-467; |
| | | | 1.137; | 196-198; | FNTYPEII 472-487; |
| | | | 126-133, | PKC_PHOSPHO_SITE | fn2 330-371; |
| | | | 1.137; | 373-375; | fn2 388-429; fn2 |
| | | | 386-403, | PKC_PHOSPHO_SITE | 447-488; PT 572-607; |
| | | | 1.131; | 481-483; | Peptidase_M10 |
| | | | 286-296, | PKC_PHOSPHO_SITE | 209-315; |
| | | | 1.127; | 578-580; | Peptidase_M10_N |
| | | | 10-26, 1.119; | CK2_PHOSPHO_SITE | 126-203; ZnMc 212-545; |
| | | | 242-262, | 85-88; | FN2 323-371; |
| | | | 1.108; | CK2_PHOSPHO_SITE | FN2 381-429; FN2 |
| | | | 198-205, | 179-182; | 440-488; PRO_RICH |
| | | | 1.103; | CK2_PHOSPHO_SITE | 545-611; |
| | | | 426-432, | 431-434; | FIBRONECTIN_2 330-371; |
| | | | 1.102; | CK2_PHOSPHO_SITE | FIBRONECTIN_2 |
| | | | 233-239, | 442-445; | 388-429; |
| | | | 1.093; | CK2_PHOSPHO_SITE | FIBRONECTIN_2 447-488; |
| | | | 145-157, | 477-480; | ZINC_PROTEASE |
| | | | 1.092; | CK2_PHOSPHO_SITE | 498-507; |
| | | | 368-375, | 513-516; | CYSTEINE_SWITCH |
| | | | 1.089; | CK2_PHOSPHO_SITE | 197-204; |
| | | | 538-545, | 610-613; | |
| | | | 1.068; | TYR_PHOSPHO_SITE | |
| | | | 528-534, | 142-150; | |
| | | | 1.066; | MYRISTYL 5-10; | |
| | | | 92-98, 1.06; | MYRISTYL | |
| | | | 34-39, 1.053; | 115-120; | |
| | | | 215-226, | MYRISTYL 323-328; | |
| | | | 1.045; | MYRISTYL | |
| | | | 411-417, | 352-357; | |
| | | | 1.042; | MYRISTYL 381-386; | |
| | | | | MYRISTYL | |
| | | | | 396-401; | |
| | | | | MYRISTYL 439-444; | |
| | | | | MYRISTYL | |
| | | | | 440-445; | |
| | | | | MYRISTYL 508-513; | |
| | | | | MYRISTYL | |
| | | | | 621-626; | |
| | | | | MYRISTYL 622-627; | |
| | | | | RGD 466-468; | |
| DEX0488_{—} | N | 1 - | 81-98, 1.307; | ASN_GLYCOSYLATION | sp_Q9H4Z1_Q9H4Z1_HUMAN |
| 001.orf.4 | | i1-75; | 581-598, | 115-118; | 307-348; |
| | | tm76-98; | 1.202; | ASN GLYCOSYLATION | sp_Q9H4Z1 Q9H4Z1 HUMAN |
| | | o99-605; | 20-55, 1.175; | 197-200; | 365-406; |
| | | | 463-500, | ASN_GLYCOSYLATION | sp_Q9H4Z1_Q9H4Z1_HUMAN |
| | | | 1.173; | 204-207; | 424-465; |
| | | | 421-430, | PKC_PHOSPHO_SITE | PRICHEXTENSN 523-539; |
| | | | 1.171; | 5-7; | PRICHEXTENSN |
| | | | 144-158, | PKC_PHOSPHO_SITE | 547-559; |
| | | | 1.163; | 8-10; | PRICHEXTENSN 562-583; |
| | | | 288-297, | PKC_PHOSPHO_SITE | MATRIXIN 171-184; |
| | | | 1.155; | 32-34; | MATRIXIN 218-233; |
| | | | 241-252, 1.15; | PKC_PHOSPHO_SITE | MATRIXIN 241-269; |
| | | | 304-312, | 47-49; | MATRIXIN 475-500; |
| | | | 1.144; | PKC_PHOSPHO_SITE | MATRIXIN 508-521; |
| | | | 538-555, | 117-119; | FNTYPEII 421-430; |
| | | | 1.137; | PKC_PHOSPHO_SITE | FNTYPEII 432-444; |
| | | | 103-110, | 167-169; | FNTYPEII 449-464; |
| | | | 1.137; | PKC_PHOSPHO_SITE | fn2 307-348; |
| | | | 363-380, | 173-175; | fn2 365-406; fn2 |
| | | | 1.131; | PKC_PHOSPHO_SITE | 424-465; PT 549-584; |
| | | | 263-273, | 350-352; | Peptidase_M10 |
| | | | 1.127; | PKC_PHOSPHO_SITE | 186-292; |
| | | | 219-239, | 458-460; | Peptidase_M10_N |
| | | | 1.108; | PKC_PHOSPHO_SITE | 103-180; ZnMc 189-522; |
| | | | 175-182, | 555-557; | FN2 300-348; |
| | | | 1.103; | CK2_PHOSPHO_SITE | FN2 358-406; FN2 |
| | | | 403-409, | 3-6; | 417-465; PRO_RICH |
| | | | 1.102; | CK2_PHOSPHO_SITE | 522-588; |
| | | | 210-216, | 62-65; | FIBRONECTIN_2 307-348; |
| | | | 1.093; | CK2_PHOSPHO_SITE | FIBRONECTIN_2 |
| | | | 122-134, | 156-159; | 365-406; |
| | | | 1.092; | CK2_PHOSPHO_SITE | FIBRONECTIN_2 424-465; |
| | | | 345-352, | 408-411; | ZINC_PROTEASE |
| | | | 1.089; | CK2_PHOSPHO_SITE | 475-484; |
| | | | 515-522, | 419-422; | CYSTEINE_SWITCH |
| | | | 1.068; | CK2_PHOSPHO_SITE | 174-181; |
| | | | 505-511, | 454-457; | |
| | | | 1.066; | CK2_PHOSPHO_SITE | |
| | | | 69-75, 1.06; | 490-493; | |
| | | | 11-16, 1.053; | CK2_PHOSPHO_SITE | |
| | | | 192-203, | 587-590; | |
| | | | 1.045; | TYR_PHOSPHO_SITE | |
| | | | 388-394, | 119-127; | |
| | | | 1.042; | MYRISTYL 92-97; | |
| | | | | MYRISTYL | |
| | | | | 300-305; | |
| | | | | MYRISTYL 329-334; | |
| | | | | MYRISTYL | |
| | | | | 358-363; | |
| | | | | MYRISTYL 373-378; | |
| | | | | MYRISTYL | |
| | | | | 416-421; | |
| | | | | MYRISTYL 417-422; | |
| | | | | MYRISTYL | |
| | | | | 485-490; | |
| | | | | MYRISTYL 598-603; | |
| | | | | MYRISTYL | |
| | | | | 599-604; RGD | |
| | | | | 443-445; | |
| DEX0488_{—} | N | 0 - | 50-72, 1.216; | ASN_GLYCOSYLATION | sp_Q9H4Z1_Q9H4Z1_HUMAN |
| 001.aa.5 | | o1-503; | 182-219, | 6-9; | 84-125; |
| | | | 1.173; | ASN_GLYCOSYLATION | sp_Q9H4Z1_Q9H4Z1_HUMAN |
| | | | 140-149, | 47-50; | 143-184; |
| | | | 1.171; | PKC_PHOSPHO_SITE | PRICHEXTENSN 242-258; |
| | | | 300-321, | 177-179; | PRICHEXTENSN |
| | | | 1.152; | PKC_PHOSPHO_SITE | 266-278; |
| | | | 484-500, | 274-276; | PRICHEXTENSN 281-302; |
| | | | 1.152; | PKC_PHOSPHO_SITE | MATRIXIN 194-219; |
| | | | 257-274, | 372-374; | MATRIXIN 227-240; |
| | | | 1.137; | PKC_PHOSPHO_SITE | FNTYPEII 140-149; |
| | | | 82-99, 1.131; | 379-381; | FNTYPEII 151-163; |
| | | | 372-395, | PKC_PHOSPHO_SITE | FNTYPEII 168-183; |
| | | | 1.112; | 415-417; | fn2 84-125; |
| | | | 10-29, 1.109; | PKC_PHOSPHO_SITE | fn2 143-184; PT |
| | | | 122-128, | 424-426; | 268-303; hemopexin |
| | | | 1.102; | PKC_PHOSPHO_SITE | 317-361; hemopexin |
| | | | 399-412, | 479-481; | 363-404; hemopexin |
| | | | 1.099; | CK2_PHOSPHO_SITE | 409-455; hemopexin |
| | | | 451-463, | 127-130; | 457-500; ZnMc 118-241; |
| | | | 1.085; | CK2_PHOSPHO_SITE | HX 317-361; |
| | | | 325-332, 1.08; | 138-141; | HX 363-404; HX |
| | | | 465-473, | CK2_PHOSPHO_SITE | 409-455; HX 457-500; |
| | | | 1.077; | 173-176; | FN2 77-125; |
| | | | 348-370, | CK2_PHOSPHO_SITE | FN2 136-184; |
| | | | 1.073; | 209-212; | PRO_RICH 241-307; |
| | | | 234-241, | CK2_PHOSPHO_SITE | FIBRONECTIN_2 84-125; |
| | | | 1.068; | 306-309; | FIBRONECTIN_2 |
| | | | 430-441, | CK2_PHOSPHO_SITE | 143-184; HEMOPEXIN |
| | | | 1.067; | 365-368; | 352-367; |
| | | | 224-230, | CK2_PHOSPHO_SITE | ZINC_PROTEASE 194-203; |
| | | | 1.066; | 442-445; | |
| | | | 475-481, | CK2_PHOSPHO_SITE | |
| | | | 1.061; | 444-447; | |
| | | | 107-113, | CK2_PHOSPHO_SITE | |
| | | | 1.042; | 480-483; | |
| | | | 420-425, | MYRISTYL 4-9; | |
| | | | 1.033; | MYRISTYL 52-57; | |
| | | | | MYRISTYL | |
| | | | | 77-82; | |
| | | | | MYRISTYL 92-97; | |
| | | | | MYRISTYL | |
| | | | | 135-140; | |
| | | | | MYRISTYL 136-141; | |
| | | | | MYRISTYL | |
| | | | | 204-209; | |
| | | | | MYRISTYL 403-408; | |
| | | | | MYRISTYL | |
| | | | | 411-416; | |
| | | | | AMIDATION | |
| | | | | 424-427; RGD | |
| | | | | 162-164; | |
| DEX0488_{—} | N | 0 - | 104-121, | ASN_GLYCOSYLATION | sp_Q9H4Z1_Q9H4Z1_HUMAN |
| 001.aa.6 | | o1-838; | 1.307; | 138-141; | 361-402; |
| | | | 43-78, 1.175; | ASN_GLYCOSYLATION | sp_Q9H4Z1_Q9H4Z1_HUMAN |
| | | | 517-554, | 220-223; | 419-460; |
| | | | 1.173; | ASN_GLYCOSYLATION | sp_Q9H4Z1_Q9H4Z1_HUMAN |
| | | | 475-484, | 227-230; | 478-519; |
| | | | 1.171; | PKC_PHOSPHO_SITE | PRICHEXTENSN 570-582; |
| | | | 167-181, | 31-33; | PRICHEXTENSN |
| | | | 1.163; | PKC_PHOSPHO_SITE | 584-600; |
| | | | 317-351, | 55-57; | PRICHEXTENSN 616-637; |
| | | | 1.155; | PKC_PHOSPHO_SITE | MATRIXIN 194-207; |
| | | | 819-835, | 70-72; | MATRIXIN 241-256; |
| | | | 1.152; | PKC_PHOSPHO_SITE | MATRIXIN 264-292; |
| | | | 635-656, | 140-142; | FNTYPEII 475-484; |
| | | | 1.152; | PKC_PHOSPHO_SITE | FNTYPEII 486-498; |
| | | | 264-275, 1.15; | 190-192; | FNTYPEII 503-518; |
| | | | 358-366, | PKC_PHOSPHO_SITE | fn2 361-402; |
| | | | 1.144; | 196-198; | fn2 419-460; fn2 |
| | | | 592-609, | PKC_PHOSPHO_SITE | 478-519; PT 603-638; |
| | | | 1.137; | 404-406; | Peptidase_M10 |
| | | | 126-133, | PKC_PHOSPHO_SITE | 209-315; |
| | | | 1.137; | 512-514; | Peptidase_M10_N |
| | | | 417-434, | PKC_PHOSPHO_SITE | 126-203; hemopexin |
| | | | 1.131; | 609-611; | 652-696; hemopexin |
| | | | 286-296, | PKC_PHOSPHO_SITE | 698-739; hemopexin |
| | | | 1.127; | 707-709; | 744-790; hemopexin |
| | | | 10-26, 1.119; | PKC_PHOSPHO_SITE | 792-835; ZnMc 212-576; |
| | | | 707-730, | 714-716; | HX 652-696; |
| | | | 1.112; | PKC_PHOSPHO_SITE | HX 698-739; HX |
| | | | 242-262, | 750-752; | 744-790; HX 792-835; |
| | | | 1.108; | PKC_PHOSPHO_SITE | FN2 354-402; |
| | | | 198-205, | 759-761; | FN2 412-460; FN2 |
| | | | 1.103; | PKC_PHOSPHO_SITE | 471-519; PRO_RICH |
| | | | 457-463, | 814-816; | 576-642; |
| | | | 1.102; | CK2_PHOSPHO_SITE | FIBRONECTIN_2 361-402; |
| | | | 734-747, | 85-88; | FIBRONECTIN_2 |
| | | | 1.099; | CK2_PHOSPHO_SITE | 419-460; |
| | | | 233-239, | 179-182; | FIBRONECTIN_2 478-519; |
| | | | 1.093; | CK2_PHOSPHO_SITE | HEMOPEXIN |
| | | | 145-157, | 462-465; | 687-702; |
| | | | 1.092; | CK2_PHOSPHO_SITE | ZINC_PROTEASE 529-538; |
| | | | 399-406, | 473-476; | CYSTEINE_SWITCH |
| | | | 1.089; | CK2_PHOSPHO_SITE | 197-204; |
| | | | 786-798, | 508-511; | |
| | | | 1.085; | CK2_PHOSPHO_SITE | |
| | | | 660-667, 1.08; | 544-547; | |
| | | | 800-808, | CK2_PHOSPHO_SITE | |
| | | | 1.077; | 641-644; | |
| | | | 683-705, | CK2_PHOSPHO_SITE | |
| | | | 1.073; | 700-703; | |
| | | | 569-576, | CK2_PHOSPHO_SITE | |
| | | | 1.068; | 777-780; | |
| | | | 765-776, | CK2_PHOSPHO_SITE | |
| | | | 1.067; | 779-782; | |
| | | | 559-565, | CK2_PHOSPHO_SITE | |
| | | | 1.066; | 815-818; | |
| | | | 810-816, | TYR_PHOSPHO_SITE | |
| | | | 1.061; | 142-150; | |
| | | | 92-98, 1.06; | MYRISTYL 5-10; | |
| | | | 34-39, 1.053; | MYRISTYL | |
| | | | 215-226, | 115-120; | |
| | | | 1.045; | MYRISTYL 354-359; | |
| | | | 442-448, | MYRISTYL | |
| | | | 1.042; | 383-388; | |
| | | | 755-760, | MYRISTYL 412-417; | |
| | | | 1.033; | MYRISTYL | |
| | | | | 427-432; | |
| | | | | MYRISTYL 470-475, | |
| | | | | MYRISTYL | |
| | | | | 471-476; | |
| | | | | MYRISTYL 539-544; | |
| | | | | MYRISTYL | |
| | | | | 738-743; | |
| | | | | MYRISTYL 746-751; | |
| | | | | AMIDATION | |
| | | | | 759-762; RGD | |
| | | | | 497-499; | |
| DEX0488_{—} | N | 0 - | 199-236, | PKC_PHOSPHO_SITE | sp_Q9H4Z1_Q9H4Z1_HUMAN |
| 001.orf.6 | | o1-520; | 1.173; | 86-88; | 43-84; |
| | | | 157-166, | PKC_PHOSPHO_SITE | sp_Q9H4Z1_Q9H4Z1_HUMAN |
| | | | 1.171; 5-33, | 194-196; | 101-142; |
| | | | 1.155; | PKC_PHOSPHO_SITE | sp_Q9H4Z1_Q9H4Z1_HUMAN |
| | | | 317-338, | 291-293; | 160-201; |
| | | | 1.152; | PKC_PHOSPHO_SITE | PRICHEXTENSN 17-29; |
| | | | 501-517, | 389-391; | PRICHEXTENSN |
| | | | 1.152; | PKC_PHOSPHO_SITE | 265-290; |
| | | | 40-48, 1.144; | 396-398; | PRICHEXTENSN 301-313; |
| | | | 274-291, | PKC_PHOSPHO_SITE | MATRIXIN 211-236; |
| | | | 1.137; | 432-434; | MATRIXIN 244-257; |
| | | | 99-166, 1.131; | PKC_PHOSPHO_SITE | FNTYPEII 157-166; |
| | | | 389-412, | 441-443; | FNTYPEII 168-180; |
| | | | 1.112; | PKC_PHOSPHO_SITE | FNTYPEII 185-200; |
| | | | 139-145, | 496-498; | fn2 43-84; |
| | | | 1.102; | CK2_PHOSPHO_SITE | fn2 101-142; fn2 |
| | | | 416-429, | 144-147; | 160-201; PT 285-320; |
| | | | 1.099; | CK2_PHOSPHO_SITE | hemopexin |
| | | | 81-88, 1.089; | 155-158; | 334-378; hemopexin |
| | | | 468-480, | CK2_PHOSPHO_SITE | 380-421; hemopexin |
| | | | 1.085; | 190-193; | 426-472; hemopexin |
| | | | 342-349, 1.08; | CK2_PHOSPHO_SITE | 474-517; ZnMc 135-258; |
| | | | 482-490, | 226-229; | HX 334-378; |
| | | | 1.077; | CK2_PHOSPHO_SITE | HX 380-421; HX |
| | | | 365-387, | 323-326; | 426-472; HX 474-517; |
| | | | 1.073; | CK2_PHOSPHO_SITE | FN2 36-84; |
| | | | 251-258, | 382-385; | FN2 94-142; FN2 |
| | | | 1.068; | CK2_PHOSPHO_SITE | 153-201; PRO_RICH |
| | | | 447-458, | 459-462; | 258-324; |
| | | | 1.067; | CK2_PHOSPHO_SITE | FIBRONECTIN_2 43-84; |
| | | | 241-247, | 461-464; | FIBRONECTIN_2 |
| | | | 1.066; | CK2_PHOSPHO_SITE | 101-142; |
| | | | 492-498, | 497-500; | FIBRONECTIN_2 160-201; |
| | | | 1.061; | MYRISTYL 36-41; | HEMOPEXIN |
| | | | 124-130, | MYRISTYL | 369-384; |
| | | | 1.042; | 65-70; | ZINC_PROSTEASE 211-220; |
| | | | 437-442, | MYRISTYL 94-99; | |
| | | | 1.033; | MYRISTYL | |
| | | | | 109-114; | |
| | | | | MYRISTYL 152-157; | |
| | | | | MYRISTYL | |
| | | | | 153-158; | |
| | | | | MYRISTYL 221-226; | |
| | | | | MYRISTYL | |
| | | | | 420-425; | |
| | | | | MYRISTYL 428-433; | |
| | | | | AMIDATION | |
| | | | | 441-444; RGD | |
| | | | | 179-181; | |
| DEX0488_{—} | N | 0 - | 104-121, | ASN_GLYCOSYLATION | sp_Q9H4Z1_Q9H4Z1_HUMAN |
| 001.aa.7 | | o1-807; | 1.307; | 138-141; | 330-371; |
| | | | 43-78, 1.175; | ASN_GLYCOSYLATION | sp_Q9H4Z1_Q9H4Z1_HUMAN |
| | | | 486-523, | 220-223; | 388-429; |
| | | | 1.173; | ASN_GLYCOSYLATION | sp_Q9H4Z1_Q9H4Z1_HUMAN |
| | | | 444-453, | 227-230; | 447-488; |
| | | | 1.171; | PKC_PHOSPHO_SITE | PRICHEXTENSN 546-562; |
| | | | 167-181, | 31-33; | PRICHEXTENSN |
| | | | 1.163; | PKC_PHOSPHO_SITE | 570-582; |
| | | | 311-320, | 55-57; | PRICHEXTENSN 585-606; |
| | | | 1.155; | PKC_PHOSPHO_SITE | MATRIXIN 194-207; |
| | | | 788-804, | 70-72; | MATRIXIN 241-256; |
| | | | 1.152; | PKC_PHOSPHO_SITE | MATRIXIN 264-292; |
| | | | 604-625, | 140-142; | MATRIXIN 498-523; |
| | | | 1.152; | PKC_PHOSPHO_SITE | MATRIXIN 531-544; |
| | | | 264-275, 1.15; | 190-192; | FNTYPEII 444-453; |
| | | | 327-335, | PKC_PHOSPHO_SITE | FNTYPEII 455-467; |
| | | | 1.144; | 196-198; | FNTYPEII 472-487; |
| | | | 561-578, | PKC_PHOSPHO_SITE | fn2 330-371; |
| | | | 1.137; | 373-375; | fn2 388-429; fn2 |
| | | | 126-133, | PKC_PHOSPHO_SITE | 447-488; PT 572-607; |
| | | | 1.137; | 481-483; | Peptidase_M10 |
| | | | 386-403, | PKC_PHOSPHO_SITE | 209-315; |
| | | | 1.131; | 578-580; | Peptidase_M10_N |
| | | | 286-296, | PKC_PHOSPHO_SITE | 126-203; hemopexin |
| | | | 1.127; | 676-678; | 621-665; hemopexin |
| | | | 10-26, 1.119; | PKC_PHOSPHO_SITE | 667-708; hemopexin |
| | | | 676-699, | 683-685; | 713-759; hemopexin |
| | | | 1.112; | PKC_PHOSPHO_SITE | 761-804; ZnMc 212-545; |
| | | | 242-262; | 719-721; | HX 621-665; |
| | | | 1.108; | PKC_PHOSPHO_SITE | HX 667-708; HX |
| | | | 198-205, | 728-730; | 713-759; HX 761-804; |
| | | | 1.103; | PKC_PHOSPHO_SITE | FN2 323-371; |
| | | | 426-432, | 783-785; | FN2 381-429; FN2 |
| | | | 1.102; | CK2_PHOSPHO_SITE | 440-488; PRO_RICH |
| | | | 703-716, | 85-88; | 545-611; |
| | | | 1.099; | CK2_PHOSPHO_SITE | FIBRONECTIN_2 330-371; |
| | | | 233-239, | 179-182; | FIBRONECTIN_2 |
| | | | 1.093; | CK2_PHOSPHO_SITE | 388-429; |
| | | | 145-157, | 431-434; | FIBRONECTIN_2 447-488; |
| | | | 1.092; | CK2_PHOSPHO_SITE | HEMOPEXIN |
| | | | 368-375, | 442-445; | 656-671; |
| | | | 1.089; | CK2_PHOSPHO_SITE | ZINC_PROTEASE 498-507; |
| | | | 755-767, | 477-480; | CYSTEINE_SWITCH |
| | | | 1.085; | CK2_PHOSPHO_SITE | 197-204; |
| | | | 629-636, 1.08; | 513-516; | |
| | | | 769-777, | CK2_PHOSPHO_SITE | |
| | | | 1.077; | 610-613; | |
| | | | 652-674, | CK2_PHOSPHO_SITE | |
| | | | 1.073; | 669-672; | |
| | | | 538-545, | CK2_PHOSPHO_SITE | |
| | | | 1.068; | 746-749; | |
| | | | 734-745, | CK2_PHOSPHO_SITE | |
| | | | 1.067; | 748-751; | |
| | | | 528-534, | CK2_PHOSPHO_SITE | |
| | | | 1.066; | 784-787; | |
| | | | 779-785, | TYR_PHOSPHO_SITE | |
| | | | 1.061; | 142-150; | |
| | | | 92-98, 1.06; | MYRISTYL 5-10; | |
| | | | 34-39, 1.053; | MYRISTYL | |
| | | | 215-226, | 115-120; | |
| | | | 1.045; | MYRISTYL 323-328; | |
| | | | 411-417, | MYRISTYL | |
| | | | 1.042; | 352-357; | |
| | | | 724-729, | MYRISTYL 381-386; | |
| | | | 1.033; | MYRISTYL | |
| | | | | 396-401; | |
| | | | | MYRISTYL 439-444; | |
| | | | | MYRISTYL | |
| | | | | 440-445; | |
| | | | | MYRISTYL 508-513; | |
| | | | | MYRISTYL | |
| | | | | 707-712; | |
| | | | | MYRISTYL 715-720; | |
| | | | | AMIDATION | |
| | | | | 728-731; RGD | |
| | | | | 466-468; | |
| DEX0488_{—} | N | 1 - | 81-98, 1.307; | ASN_GLYCOSYLATION | sp_Q9H4Z1_Q9H4Z1_HUMAN |
| 001.orf.7 | | i1-75; | 20-55, 1.175; | 115-118; | 307-348; |
| | | tm76-98; | 463-500, | ASN_GLYCOSYLATION | sp_Q9H4Z1_Q9H4Z1_HUMAN |
| | | o99-784; | 1.173; | 197-200; | 365-406; |
| | | | 421-430, | ASN_GLYCOSYLATION | sp_Q9H4Z1_Q9H4Z1_HUMAN |
| | | | 1.171; | 204-207; | 424-465; |
| | | | 144-158, | PKC_PHOSPHO_SITE | PRICHEXTENSN 523-539; |
| | | | 1.163; | 5-7; | PRICHEXTENSN |
| | | | 288-297, | PKC_PHOSPHO_SITE | 547-559; |
| | | | 1.155; | 8-10; | PRICHEXTENSN 562-583; |
| | | | 581-602, | PKC_PHOSPHO_SITE | MATRIXIN 171-184; |
| | | | 1.152; | 32-34; | MATRIXIN 218-233; |
| | | | 765-781, | PKC_PHOSPHO_SITE | MATRIXIN 241-269; |
| | | | 1.152; | 47-49; | MATRIXIN 475-500; |
| | | | 241-252, 1.15; | PKC_PHOSPHO_SITE | MATRIXIN 508-521; |
| | | | 304-312, | 117-119; | FNTYPEII 421-430; |
| | | | 1.144; | PKC_PHOSPHO_SITE | FNTYPEII 432-444; |
| | | | 538-555, | 167-169; | FNTYPEII 449-464; |
| | | | 1.137; | PKC_PHOSPHO_SITE | fn2 307-348; |
| | | | 103-110, | 173-175; | fn2 365-406; fn2 |
| | | | 1.137; | PKC_PHOSPHO_SITE | 424-465; PT 549-584; |
| | | | 363-380, | 350-352; | Peptidase_M10 |
| | | | 1.131; | PKC_PHOSPHO_SITE | 186-292; |
| | | | 263-273, | 458-460; | Peptidase_M10_N |
| | | | 1.127; | PKC_PHOSPHO_SITE | 103-180; hemopexin |
| | | | 653-676, | 555-557; | 598-642; hemopexin |
| | | | 1.112; | PKC_PHOSPHO_SITE | 644-685; hemopexin |
| | | | 219-239, | 653-655; | 690-736; hemopexin |
| | | | 1.108; | PKC_PHOSPHO_SITE | 738-781; ZnMc 189-522; |
| | | | 175-182, | 660-662; | HX 598-642; |
| | | | 1.103; | PKC_PHOSPHO_SITE | HX 644-685; HX |
| | | | 403-409, | 696-698; | 690-736; HX 738-781; |
| | | | 1.102; | PKC_PHOSPHO_SITE | FN2 300-348; |
| | | | 680-693, | 705-707; | FN2 358-406; FN2 |
| | | | 1.099; | PKC_PHOSPHO_SITE | 417-465; PRO_RICH |
| | | | 210-216, | 760-762; | 522-588; |
| | | | 1.093; | CK2_PHOSPHO_SITE | FIBRONECTIN_2 307-348; |
| | | | 122-134, | 3-6; | FIBRONECTIN_2 |
| | | | 1.092; | CK2 PHOSPHO_SITE | 365-406; |
| | | | 345-352, | 62-65; | FIBRONECTIN_2 424-465; |
| | | | 1.089; | CK2_PHOSPHO_SITE | HEMOPEXIN |
| | | | 732-744, | 156-159; | 633-648; |
| | | | 1.085; | CK2_PHOSPHO_SITE | ZINC_PROTEASE 475-484; |
| | | | 606-613, 1.08; | 408-411; | CYSTEINE_SWITCH |
| | | | 746-754, | CK2_PHOSPHO_SITE | 174-181; |
| | | | 1.077; | 419-422; | |
| | | | 629-651, | CK2_PHOSPHO_SITE | |
| | | | 1.073; | 454-457; | |
| | | | 515-522, | CK2_PHOSPHO_SITE | |
| | | | 1.068; | 490-493; | |
| | | | 711-722, | CK2_PHOSPHO_SITE | |
| | | | 1.067; | 587-590; | |
| | | | 505-511, | CK2_PHOSPHO_SITE | |
| | | | 1.066; | 646-649; | |
| | | | 756-762, | CK2_PHOSPHO_SITE | |
| | | | 1.061; | 723-726; | |
| | | | 69-75, 1.06; | CK2_PHOSPHO_SITE | |
| | | | 11-16, 1.053; | 725-728; | |
| | | | 192-203, | CK2_PHOSPHO_SITE | |
| | | | 1.045; | 761-764; | |
| | | | 388-394, | TYR_PHOSPHO_SITE | |
| | | | 1.042; | 119-127; | |
| | | | 701-706, | MYRISTYL 92-97; | |
| | | | 1.033; | MYRISTYL | |
| | | | | 300-305; | |
| | | | | MYRISTYL 329-334; | |
| | | | | MYRISTYL | |
| | | | | 358-363; | |
| | | | | MYRISTYL 373-378; | |
| | | | | MYRISTYL | |
| | | | | 416-421; | |
| | | | | MYRISTYL 417-422; | |
| | | | | MYRISTYL | |
| | | | | 485-490; | |
| | | | | MYRISTYL 684-689; | |
| | | | | MYRISTYL | |
| | | | | 692-697; | |
| | | | | AMIDATION | |
| | | | | 705-708; RGD | |
| | | | | 443-445; | |
| DEX0488_{—} | N | 0 - | 57-73, 1.152; | ASN_GLYCOSYLATION | hemopexin 28-73; |
| 001.aa.8 | | o1-76; | 38-46, 1.108; | 34-37; | |
| | | | 48-54, 1.061; | PKC_PHOSPHO_SITE | |
| | | | 13-19; 1.043; | 15-17; | |
| | | | | PKC_PHOSPHO_SITE | |
| | | | | 52-54; | |
| | | | | CK2_PHOSPHO_SITE | |
| | | | | 21-24; | |
| | | | | CK2_PHOSPHO_SITE | |
| | | | | 53-56; | |
| | | | | TYR_PHOSPHO_SITE | |
| | | | | 35-41; | |
| | | | | MYRISTYL 6-11; | |
| DEX0488_{—} | N | 0 - | 30-48, 1.16; | PKC_PHOSPHO_SITE | hemopexin 34-93; |
| 001.orf.8 | | o1-96; | 77-93, 1.152; | 72-74; | |
| | | | 11-19, 1.107; | CK2_PHOSPHO_SITE | |
| | | | 59-66, 1.082; | 73-76; | |
| | | | 68-74, 1.061; | | |
| DEX0488_{—} | N | 0 - | 104-121, | ASN_GLYCOSYLATION | sp_Q9H4Z1_Q9H4Z1_HUMAN |
| 001.aa.9 | | o1-460; | 1.307; | 138-141; | 330-371; |
| | | | 43-78, 1.175; | ASN_GLYCOSYLATION | sp_Q9H4Z1_Q9H4Z1_HUMAN |
| | | | 444-453, | 220-223; | 388-429; |
| | | | 1.171; | ASN_GLYCOSYLATION | MATRIXIN 194-207; |
| | | | 167-181, | 227-230; | MATRIXIN 241-256; |
| | | | 1.163; | PKC_PHOSPHO_SITE | MATRIXIN 264-292; |
| | | | 311-320, | 31-33; | FNTYPEII 385-394; |
| | | | 1.155; | PKC_PHOSPHO_SITE | FNTYPEII 396-408; |
| | | | 264-275, 1.15; | 55-57; | FNTYPEII 413-428; |
| | | | 327-335, | PKC_PHOSPHO_SITE | fn2 330-371; fn2 |
| | | | 1.144; | 70-72; | 388-429; |
| | | | 126-133, | PKC_PHOSPHO_SITE | Peptidase_M10 209-315; |
| | | | 1.137; | 140-142; | Peptidase_M10_N |
| | | | 386-403, | PKC_PHOSPHO_SITE | 126-203; ZnMc 212-338; |
| | | | 1.131; | 190-192; | FN2 323-371; |
| | | | 286-296, | PKC_PHOSPHO_SITE | FN2 381-429; |
| | | | 1.127; | 196-198; | FIBRONECTIN_2 330-371; |
| | | | 10-26, 1.119; | PKC_PHOSPHO_SITE | FIBRONECTIN_2 |
| | | | 242-262, | 373-375; | 388-429; |
| | | | 1.108; | CK2_PHOSPHO_SITE | CYSTEINE_SWITCH |
| | | | 198-205, | 85-88; | 197-204; |
| | | | 1.103; | CK2_PHOSPHO_SITE | |
| | | | 426-432, | 179-182; | |
| | | | 1.102; | CK2_PHOSPHO_SITE | |
| | | | 233-239, | 431-434; | |
| | | | 1.093; | CK2_PHOSPHO_SITE | |
| | | | 145-157, | 442-445; | |
| | | | 1.092; | TYR_PHOSPHO_SITE | |
| | | | 368-375, | 142-150; | |
| | | | 1.089; | MYRISTYL 5-10; | |
| | | | 92-98, 1.06; | MYRISTYL | |
| | | | 34-39, 1.053; | 115-120; | |
| | | | 215-226, | MYRISTYL 323-328; | |
| | | | 1.045; | MYRISTYL | |
| | | | 411-417, | 352-357; | |
| | | | 1.042; | MYRISTYL 381-386; | |
| | | | | MYRISTYL | |
| | | | | 396-401; | |
| | | | | MYRISTYL 439-444; | |
| | | | | MYRISTYL | |
| | | | | 440-445; | |
| DEX0488_{—} | N | 1 - | 81-98, 1.307; | ASN_GLYCOSYLATION | sp_Q9H4Z1_Q9H4Z1_HUMAN |
| 001.orf.9 | | i1-75; | 20-55, 1.175; | 115-118; | 307-348; |
| | | tm76-98; | 421-430, | ASN_GLYCOSYLATION | sp_Q9H4Z1_Q9H4Z1_HUMAN |
| | | o99-437; | 1.171; | 197-200; | 365-406; |
| | | | 144-158, | ASN_GLYCOSYLATION | MATRIXIN 171-184; |
| | | | 1.163; | 204-207; | MATRIXIN 218-233; |
| | | | 288-297, | PKC_PHOSPHO_SITE | MATRIXIN 241-269; |
| | | | 1.155; | 5-7; | FNTYPEII 362-371; |
| | | | 241-252, 1.15; | PKC_PHOSPHO_SITE | FNTYPEII 373-385; |
| | | | 304-312, | 8-10; | FNTYPEII 390-405; |
| | | | 1.144; | PKC_PHOSPHO_SITE | fn2 307-348; fn2 |
| | | | 103-110, | 32-34; | 365-406; |
| | | | 1.137; | PKC_PHOSPHO_SITE | Peptidase_M10 186-292; |
| | | | 363-380, | 47-49; | Peptidase_M10_N |
| | | | 1.131; | PKC_PHOSPHO_SITE | 103-180; ZnMc 189-315; |
| | | | 263-273, | 117-119; | FN2 300-348; |
| | | | 1.127; | PKC_PHOSPHO_SITE | FN2 358-406; |
| | | | 219-239, | 167-169; | FIBRONECTIN_2 307-348; |
| | | | 1.108; | PKC_PHOSPHO_SITE | FIBRONECTIN_2 |
| | | | 175-182, | 173-175; | 365-406; |
| | | | 1.103; | PKC_PHOSPHO_SITE | CYSTEINE_SWITCH |
| | | | 403-409, | 350-352; | 174-181; |
| | | | 1.102; | CK2_PHOSPHO_SITE | |
| | | | 210-216, | 3-6; | |
| | | | 1.093; | CK2_PHOSPHO_SITE | |
| | | | 122-134, | 62-65; | |
| | | | 1.092; | CK2_PHOSPHO_SITE | |
| | | | 345-352, | 156-159; | |
| | | | 1.089; | CK2_PHOSPHO_SITE | |
| | | | 69-75, 1.06; | 408-411; | |
| | | | 11-16, 1.053; | CK2_PHOSPHO_SITE | |
| | | | 192-203, | 419-422; | |
| | | | 1.045; | TYR_PHOSPHO_SITE | |
| | | | 388-394, | 119-127; | |
| | | | 1.042; | MYRISTYL 92-97; | |
| | | | | MYRISTYL | |
| | | | | 300-305; | |
| | | | | MYRISTYL 329-334; | |
| | | | | MYRISTYL | |
| | | | | 358-363; | |
| | | | | MYRISTYL 373-378; | |
| | | | | MYRISTYL | |
| | | | | 416-421; | |
| | | | | MYRISTYL 417-422; | |
| DEX0488_{—} | N | 0 - | 104-121; | ASN_GLYCOSYLATION | sp_Q9H4Z1_Q9H4Z1_HUMAN |
| 001.aa.10 | | o1-916; | 1.307; | 138-141; | 330-371; |
| | | | 711-719, | ASN_GLYCOSYLATION | sp_Q9H4Z1_Q9H4Z1_HUMAN |
| | | | 1.208; | 220-223; | 388-429; |
| | | | 43-78, 1.175; | ASN_GLYCOSYLATION | sp_Q9H4Z1_Q9H4Z1_HUMAN |
| | | | 486-523, | 227-230; | 447-488; |
| | | | 1.173; | PKC_PHOSPHO_SITE | PRICHEXTENSN 546-562; |
| | | | 444-453, | 31-33; | PRICHEXTENSN |
| | | | 1.171; | PKC_PHOSPHO_SITE | 570-582; |
| | | | 775-784, | 55-57; | PRICHEXTENSN 585-606; |
| | | | 1.163; | PKC_PHOSPHO_SITE | MATRIXIN 194-207; |
| | | | 167-181, | 70-72; | MATRIXIN 241-256; |
| | | | 1.163; | PKC_PHOSPHO_SITE | MATRIXIN 264-292; |
| | | | 311-320, | 140-142; | MATRIXIN 498-523; |
| | | | 1.155; | PKC_PHOSPHO_SITE | MATRIXIN 531-544; |
| | | | 897-913, | 190-192; | FNTYPEII 444-453; |
| | | | 1.152; | PKC_PHOSPHO_SITE | FNTYPEII 455-467; |
| | | | 604-625, | 196-198; | FNTYPEII 472-487; |
| | | | 1.152; | PKC_PHOSPHO_SITE | fn2 330-371; |
| | | | 264-275, 1.15; | 373-375; | fn2 388-429; fn2 |
| | | | 327-335, | PKC_PHOSPHO_SITE | 447-488; PT 572-607; |
| | | | 1.144; | 481-483; | Peptidase_M10 |
| | | | 561-578, | PKC_PHOSPHO_SITE | 209-315; |
| | | | 1.137; | 578-580; | Peptidase_M10_N |
| | | | 126-133, | PKC_PHOSPHO_SITE | 126-203; hemopexin |
| | | | 1.137; | 676-678; | 621-655; hemopexin |
| | | | 386-403, | PKC_PHOSPHO_SITE | 822-868; hemopexin |
| | | | 1.131; | 698-700; | 870-913; ZnMc 212-545; |
| | | | 286-296, | PKC_PHOSPHO_SITE | HX 621-665; |
| | | | 1.127; | 727-729; | HX 822-868; HX |
| | | | 741-757, | PKC_PHOSPHO_SITE | 870-913; FN2 323-371; |
| | | | 1.121; | 739-741; | FN2 381-429; |
| | | | 10-26, 1.119; | PKC_PHOSPHO_SITE | FN2 440-488; |
| | | | 793-808, | 771-773; | PRO_RICH 545-611; |
| | | | 1.112; | PKC_PHOSPHO_SITE | FIBRONECTIN_2 330-371; |
| | | | 242-262, | 828-830; | FIBRONECTIN_2 |
| | | | 1.108; | PKC_PHOSPHO_SITE | 388-429; |
| | | | 198-205, | 837-839; | FIBRONECTIN_2 447-488; |
| | | | 1.103; | PKC_PHOSPHO_SITE | HEMOPEXIN |
| | | | 426-432, | 892-894; | 656-671; |
| | | | 1.102; | CK2_PHOSPHO_SITE | ZINC_PROTEASE 498-507; |
| | | | 812-825, | 85-88; | CYSTEINE_SWITCH |
| | | | 1.099; | CK2_PHOSPHO_SITE | 197-204; |
| | | | 233-239, | 179-182; | |
| | | | 1.093; | CK2_PHOSPHO_SITE | |
| | | | 145-157, | 431-434; | |
| | | | 1.092; | CK2_PHOSPHO_SITE | |
| | | | 368-375, | 442-445; | |
| | | | 1.089; | CK2_PHOSPHO_SITE | |
| | | | 734-739, | 477-480; | |
| | | | 1.087; | CK2_PHOSPHO_SITE | |
| | | | 864-876, | 513-516; | |
| | | | 1.085; | CK2_PHOSPHO_SITE | |
| | | | 629-636, 1.08; | 610-613; | |
| | | | 676-702, | CK2_PHOSPHO_SITE | |
| | | | 1.079; | 669-672; | |
| | | | 878-886, | CK2_PHOSPHO_SITE | |
| | | | 1.077; | 698-701; | |
| | | | 652-674, | CK2_PHOSPHO_SITE | |
| | | | 1.073; | 855-858; | |
| | | | 538-545, | CK2_PHOSPHO_SITE | |
| | | | 1.068; | 857-860; | |
| | | | 843-854, | CK2_PHOSPHO_SITE | |
| | | | 1.067; | 893-896; | |
| | | | 528-534, | TYR_PHOSPHO_SITE | |
| | | | 1.066; | 142-150; | |
| | | | 888-894, | MYRISTYL 5-10; | |
| | | | 1.061; | MYRISTYL | |
| | | | 92-98, 1.06; | 115-120; | |
| | | | 34-39, 1.053; | MYRISTYL 323-328; | |
| | | | 215-226, | MYRISTYL | |
| | | | 1.045; | 352-357; | |
| | | | 411-417, | MYRISTYL 381-386; | |
| | | | 1.042; | MYRISTYL | |
| | | | 833-838, | 396-401; | |
| | | | 1.033; | MYRISTYL 439-444; | |
| | | | | MYRISTYL | |
| | | | | 440-445; | |
| | | | | MYRISTYL 508-513; | |
| | | | | MYRISTYL | |
| | | | | 694-699; | |
| | | | | MYRISTYL 731-736; | |
| | | | | MYRISTYL | |
| | | | | 761-766; | |
| | | | | MYRISTYL 816-821; | |
| | | | | MYRISTYL | |
| | | | | 824-829; | |
| | | | | AMIDATION | |
| | | | | 837-840; RGD | |
| | | | | 466-468; | |
| DEX0488_{—} | N | 1 - | 81-98, 1.307; | ASN_GLYCOSYLATION | sp_Q9H4Z1_Q9H4Z1_HUMAN |
| 001.orf.10 | | i1-75; | 20-55, 1.175; | 115-118; | 307-348; |
| | | tm76-98; | 463-500, | ASN_GLYCOSYLATION | sp_Q9H4Z1_Q9H4Z1_HUMAN |
| | | o99-661; | 1.173; | 197-200; | 365-406; |
| | | | 421-430, | ASN_GLYCOSYLATION | sp_Q9H4Z1_Q9H4Z1_HUMAN |
| | | | 1.171; | 204-207; | 424-465; |
| | | | 144-158, | PKC_PHOSPHO_SITE | PRICHEXTENSN 523-539; |
| | | | 1.163; | 5-7; | PRICHEXTENSN |
| | | | 288-297, | PKC_PHOSPHO_SITE | 547-559; |
| | | | 1.155; | 8-10; | PRICHEXTENSN 562-583; |
| | | | 581-602, | PKC_PHOSPHO_SITE | MATRIXIN 171-184; |
| | | | 1.152; | 32-34; | MATRIXIN 218-233; |
| | | | 241-252, 1.15; | PKC_PHOSPHO_SITE | MATRIXIN 241-269; |
| | | | 304-312, | 47-49; | MATRIXIN 475-500; |
| | | | 1.144; | PKC_PHOSPHO_SITE | MATRIXIN 508-521; |
| | | | 538-555, | 117-119; | FNTYPEII 421-430; |
| | | | 1.137; | PKC_PHOSPHO_SITE | FNTYPEII 432-444; |
| | | | 103-110, | 167-169; | FNTYPEII 449-464; |
| | | | 1.137; | PKC_PHOSPHO_SITE | fn2 307-348; |
| | | | 363-380, | 173-175; | fn2 365-406; fn2 |
| | | | 1.131; | PKC_PHOSPHO_SITE | 424-465; PT 549-584; |
| | | | 263-273, | 350-352; | Peptidase_M10 |
| | | | 1.127; | PKC_PHOSPHO_SITE | 186-292; |
| | | | 219-239, | 458-460; | Peptidase_M10_N |
| | | | 1.108; | PKC_PHOSPHO_SITE | 103-180; hemopexin |
| | | | 175-182, | 555-557; | 598-642; ZnMc 189-522; |
| | | | 1.103; | PKC_PHOSPHO_SITE | HX 598-642; |
| | | | 403-409, | 653-655; | FN2 300-348; FN2 |
| | | | 1.102; | CK2_PHOSPHO_SITE | 358-406; FN2 417-465; |
| | | | 210-216, | 3-6; | PRO_RICH 522-588; |
| | | | 1.093; | CK2_PHOSPHO_SITE | FIBRONECTIN_2 |
| | | | 122-134, | 62-65; | 307-348; |
| | | | 1.092; | CK2_PHOSPHO_SITE | FIBRONECTIN_2 365-406; |
| | | | 345-352, | 156-159; | FIBRONECTIN_2 |
| | | | 1.089; | CK2_PHOSPHO_SITE | 424-465; HEMOPEXIN |
| | | | 606-613, 1.08; | 408-411; | 633-648; |
| | | | 653-658, | CK2_PHOSPHO_SITE | ZINC_PROTEASE 475-484; |
| | | | 1.079; | 419-422; | CYSTEINE_SWITCH |
| | | | 629-651, | CK2_PHOSPHO_SITE | 174-181; |
| | | | 1.073; | 454-457; | |
| | | | 515-522, | CK2_PHOSPHO_SITE | |
| | | | 1.068; | 490-493; | |
| | | | 505-511, | CK2_PHOSPHO_SITE | |
| | | | 1.066; | 587-590; | |
| | | | 69-75, 1.06; | CK2_PHOSPHO_SITE | |
| | | | 11-16, 1.053; | 646-649; | |
| | | | 192-203, | TYR_PHOSPHO_SITE | |
| | | | 1.045; | 119-127; | |
| | | | 388-394, | MYRISTYL 92-97; | |
| | | | 1.042; | MYRISTYL | |
| | | | | 300-305; | |
| | | | | MYRISTYL 329-334; | |
| | | | | MYRISTYL | |
| | | | | 358-363; | |
| | | | | MYRISTYL 373-378; | |
| | | | | MYRISTYL | |
| | | | | 416-421; | |
| | | | | MYRISTYL 417-422; | |
| | | | | MYRISTYL | |
| | | | | 485-490; RGD | |
| | | | | 443-445; | |
| DEX0488_{—} | N | 0 - | 104-121, | ASN_GLYCOSYLATION | sp_Q9H4Z1_Q9H4Z1_HUMAN |
| 001.aa.11 | | o1-618; | 1.307; | 138-141; | 330-371; |
| | | | 43-78, 1.175; | ASN_GLYCOSYLATION | sp_Q9H4Z1_Q9H4Z1_HUMAN |
| | | | 486-523, | 220-223; | 388-429; |
| | | | 1.173; | ASN_GLYCOSYLATION | sp_Q9H4Z1_Q9H4Z1_HUMAN |
| | | | 444-453, | 227-230; | 447-488; |
| | | | 1.171; | PKC_PHOSPHO_SITE | MATRIXIN 197-207; |
| | | | 167-181, | 31-33; | MATRIXIN 241-256; |
| | | | 1.163; | PKC_PHOSPHO_SITE | MATRIXIN 264-292; |
| | | | 311-320, | 55-57; | MATRIXIN 498-523; |
| | | | 1.555; | PKC_PHOSPHO_SITE | MATRIXIN 531-544; |
| | | | 599-615, | 70-72; | FNTYPEII 444-453; |
| | | | 1.152; | PKC_PHOSPHO_SITE | FNTYPEII 455-467; |
| | | | 264-275, 1.15; | 140-142; | FNTYPEII 472-487; |
| | | | 327-335, | PKC_PHOSPHO_SITE | fn2 330-371; fn2 |
| | | | 1.444; | 190-192; | 388-429; fn2 447-488; |
| | | | 126-133, | PKC_PHOSPHO_SITE | Peptidase_M10 |
| | | | 1.137; | 196-198; | 209-315; |
| | | | 386-403, | PKC_PHOSPHO_SITE | Peptidase_M10_N |
| | | | 1.131; | 373-375; | 126-203; hemopexin |
| | | | 286-296, | PKC_PHOSPHO_SITE | 572-615; ZnMc 212-545; |
| | | | 1.127; | 481-483; | FN2 323-371; |
| | | | 10-26, 1.119; | PKC_PHOSPHO_SITE | FN2 381-429; FN2 |
| | | | 242-262, | 594-596; | 440-488; |
| | | | 1.108; | CK2_PHOSPHO_SITE | FIBRONECTIN_2 330-371; |
| | | | 198-205, | 85-88; | FIBRONECTIN_2 |
| | | | 1.103; | CK2_PHOSPHO_SITE | 388-429; |
| | | | 426-432, | 179-182; | FIBRONECTIN_2 447-488; |
| | | | 1.102; | CK2_PHOSPHO_SITE | ZINC_PROTEASE |
| | | | 233-239, | 431-434; | 498-507; |
| | | | 1.093; | CK2_PHOSPHO_SITE | CYSTEINE_SWITCH |
| | | | 145-157, | 442-445; | 197-204; |
| | | | 1.092; | CK2_PHOSPHO_SITE | |
| | | | 368-375, | 477-480; | |
| | | | 1.089; | CK2_PHOSPHO_SITE | |
| | | | 565-578, | 513-516; | |
| | | | 1.085; | CK2_PHOSPHO_SITE | |
| | | | 580-588, | 595-598; | |
| | | | 1.077; | TYR_PHOSPHO_SITE | |
| | | | 538-545, | 142-150; | |
| | | | 1.068; | MYRISTYL 5-10; | |
| | | | 528-534, | MYRISTYL | |
| | | | 1.066; | 115-120; | |
| | | | 590-596, | MYRISTYL 323-328; | |
| | | | 1.061; | MYRISTYL | |
| | | | 92-98, 1.061; | 352-357; | |
| | | | 34-39, 1.053; | MYRISTYL 381-386; | |
| | | | 215-226, | MYRISTYL | |
| | | | 1.045; | 396-401; | |
| | | | 411-417, | MYRISTYL 439-444; | |
| | | | 1.042; | MYRISTYL | |
| | | | | 440-445; | |
| | | | | MYRISTYL 508-513; | |
| | | | | RGD 466-468; | |
| DEX0488_{—} | N | 1 - | 81-98, 1.307; | ASN_GLYCOSYLATION | sp_Q9H4Z1_Q9H4Z1_HUMAN |
| 001.orf.11 | | i1-75; tm76-98; | 20-55, 1.175; | 115-118; | 307-348; |
| | | o99-595; | 463-500, | ASN GLYCOSYLATION | sp Q9H4Z1 Q9H4Z1 HUMAN |
| | | | 1.173; | 197-200; | 365-406; |
| | | | 421-430, | ASN_GLYCOSYLATION | sp_Q9H4Z1_Q9H4Z1_HUMAN |
| | | | 1.171; | 204-207; | 424-465; |
| | | | 144-158, | PKC_PHOSPHO_SITE | MATRIXIN 171-184; |
| | | | 1.163; | 5-7; | MATRIXIN 218-233; |
| | | | 288-297, | PKC_PHOSPHO_SITE | MATRIXIN 241-269; |
| | | | 1.155; | 8-10; | MATRIXIN 475-500; |
| | | | 576-592, | PKC_PHOSPHO_SITE | MATRIXIN 508-521; |
| | | | 1.152; | 32-34; | FNTYPEII 421-430; |
| | | | 241-252, 1.15; | PKC_PHOSPHO_SITE | FNTYPEII 432-444; |
| | | | 304-312, | 47-49; | FNTYPEII 449-464; |
| | | | 1.144; | PKC_PHOSPHO_SITE | fn2 307-348; fn2 |
| | | | 103-110, | 117-119; | 365-406; fn2 424-465; |
| | | | 1.137; | PKC_PHOSPHO_SITE | Peptidase_M10 |
| | | | 363-380, | 167-169; | 186-292; |
| | | | 1.131; | PKC_PHOSPHO_SITE | Peptidase_M10_N |
| | | | 263-273, | 173-175; | 103-180; hemopexin |
| | | | 1.127; | PKC_PHOSPHO_SITE | 549-592; ZnMc 189-522; |
| | | | 219-239, | 350-352; | FN2 300-348; |
| | | | 1.108; | PKC_PHOSPHO_SITE | FN2 358-406; FN2 |
| | | | 175-182, | 458-460; | 417-465; |
| | | | 1.103; | PKC_PHOSPHO_SITE | FIBRONECTIN_2 307-348; |
| | | | 403-409, | 571-573; | FIBRONECTIN_2 |
| | | | 1.102; | CK2_PHOSPHO_SITE | 365-406; |
| | | | 210-216, | 3-6; | FIBRONECTIN_2 424-465; |
| | | | 1.093; | CK2_PHOSPHO_SITE | ZINC_PROTEASE |
| | | | 122-134, | 62-65; | 475-484; |
| | | | 1.092; | CK2_PHOSPHO_SITE | CYSTEINE_SWITCH |
| | | | 345-352, | 156-159; | 174-181; |
| | | | 1.089; | CK2_PHOSPHO_SITE | |
| | | | 542-555, | 408-411; | |
| | | | 1.085; | CK2_PHOSPHO_SITE | |
| | | | 557-565, | 419-422; | |
| | | | 1.077; | CK2_PHOSPHO_SITE | |
| | | | 515-522, | 454-457; | |
| | | | 1.068; | CK2_PHOSPHO_SITE | |
| | | | 505-511, | 490-493; | |
| | | | 1.066; | CK2_PHOSPHO_SITE | |
| | | | 567-573, | 572-575; | |
| | | | 1.061; | TYR_PHOSPHO_SITE | |
| | | | 69-75, 1.06; | 119-127; | |
| | | | 11-16, 1.053; | MYRISTYL 92-97; | |
| | | | 192-203, | MYRISTYL | |
| | | | 1.045; | 300-305; | |
| | | | 388-394, | MYRISTYL 329-334; | |
| | | | 1.042; | 334; MYRISTYL | |
| | | | | 358-363; | |
| | | | | MYRISTYL 373-378; | |
| | | | | MYRISTYL | |
| | | | | 416-421; | |
| | | | | MYRISTYL 417-422; | |
| | | | | MYRISTYL | |
| | | | | 485-490; RGD | |
| | | | | 443-445; | |
| DEX0488_{—} | Y | 0 - | 4-13, 1.221; | MYRISTYL 33-38; | GLU_RICH 94-189; |
| 002.aa.1 | | o1-71; | 24-35, 1.157; | MYRISTYL | |
| | | | 40-52, 1.095; | 37-42; | |
| DEX0488_002.orf.1 | N | 0 - | 69-84, 1.151; | CAMP_PHOSPHO_{—} | |
| | | o1-117; | 29-43, 1.147; | SITE 22-25; | |
| | | | 99-109, 1.114; | PKC_PHOSPHO_SITE | |
| | | | 51-62, 1.114; | 11-13; | |
| | | | 88-93, 1.064; | PKC_PHOSPHO_SITE | |
| | | | | 74-76; | |
| | | | | CK2_PHOSPHO_SITE | |
| | | | | 83-86; | |
| | | | | MYRISTYL 10-15; | |
| | | | | MYRISTYL | |
| | | | | 97-102; | |
| | | | | MYRISTYL 109-114; | |
| | | | | AMIDATION 13-16; | |
| | | | | AMIDATION | |
| | | | | 20-23; | |
| DEX0488_{—} | N | 0 - | 23-60, 1.189; | MYRISTYL 17-22; | |
| 003.aa.1 | | i1-63; | 4-18, 1.132; | | |
| DEX0488_{—} | Y | 0 - | 21-49, 1.179; | PKC_PHOSPHO_SITE | |
| 003.orf.1 | | o1-57; | 8-14, 1.054; | 5-7; | |
| | | | | PKC_PHOSPHO_SITE | |
| | | | | 45-47; | |
| | | | | PKC_PHOSPHO_SITE | |
| | | | | 51-53; | |
| | | | | MYRISTYL 33-38; | |
| DEX0488_{—} | Y | 0 - | 6-28, 1.22; | CAMP_PHOSPHO_{—} | |
| 003.aa.2 | | o1-969; | 139-173, | SITE 144-147; | |
| | | | 1.216; | CAMP_PHOSPHO_{—} | |
| | | | 676-694, | SITE 782-785; | |
| | | | 1.203; | PKC_PHOSPHO_SITE | |
| | | | 493-517, | 36-38; | |
| | | | 1.195; | PKC_PHOSPHO_SITE | |
| | | | 233-271, | 48-50; | |
| | | | 1.189; | PKC_PHOSPHO_SITE | |
| | | | 289-321, | 387-389; | |
| | | | 1.183; | PKC_PHOSPHO_SITE | |
| | | | 726-777, | 428-430; | |
| | | | 1.174; | PKC_PHOSPHO_SITE | |
| | | | 787-802, | 438-440; | |
| | | | 1.166; | PKC_PHOSPHO_SITE | |
| | | | 558-572, 1.16; | 464-466; | |
| | | | 467-482, 1.16; | PKC_PHOSPHO_SITE | |
| | | | 456-465, | 515-517; | |
| | | | 1.153; | PKC_PHOSPHO_SITE | |
| | | | 114-132, | 780-782; | |
| | | | 1.152; | PKC_PHOSPHO_SITE | |
| | | | 389-400, | 786-788; | |
| | | | 1.149; | CK2_PHOSPHO_SITE | |
| | | | 520-531, | 119-122; | |
| | | | 1.137; | CK2_PHOSPHO_SITE | |
| | | | 210-231, | 136-139; | |
| | | | 1.131; | CK2_PHOSPHO_SITE | |
| | | | 610-636, 1.13; | 209-212; | |
| | | | 338-385, | CK2_PHOSPHO_SITE | |
| | | | 1.126; | 483-486; | |
| | | | 440-454, 1.12; | CK2_PHOSPHO_SITE | |
| | | | 807-819, | 637-640; | |
| | | | 1.119; | CK2_PHOSPHO_SITE | |
| | | | 181-188, | 857-860; | |
| | | | 1.117; | MYRISTYL 26-31; | |
| | | | 916-939, | MYRISTYL | |
| | | | 1.106; | 74-79; | |
| | | | 662-670, | MYRISTYL 132-137; | |
| | | | 1.105; | MYRISTYL | |
| | | | 541-553, | 134-139; | |
| | | | 1.104; | MYRISTYL 190-195; | |
| | | | 892-901, | MYRISTYL | |
| | | | 1.098; | 231-236; | |
| | | | 586-606, | MYRISTYL 235-240; | |
| | | | 1.098; | MYRISTYL | |
| | | | 31-46, 1.092; | 264-269; | |
| | | | 68-76, 1.088; | MYRISTYL 308-313; | |
| | | | 835-848, | MYRISTYL | |
| | | | 1.084; | 326-331; | |
| | | | 54-66, 1.082; | MYRISTYL 411-416; | |
| | | | 696-704, | MYRISTYL | |
| | | | 1.074; | 444-449; | |
| | | | 872-878, | MYRISTYL 534-539; | |
| | | | 1.057; | MYRISTYL | |
| | | | 533-539, 1.05; | 537-542; | |
| | | | 824-830, | MYRISTYL 571-576; | |
| | | | 1.039; | MYRISTYL | |
| | | | 709-719, | 576-581; | |
| | | | 1.038; | MYRISTYL 579-584; | |
| | | | 946-952, | MYRISTYL | |
| | | | 1.037; | 646-651; | |
| | | | | MYRISTYL 668-673; | |
| | | | | MYRISTYL | |
| | | | | 756-761; | |
| | | | | MYRISTYL 820-825; | |
| | | | | MYRISTYL | |
| | | | | 833-838; | |
| | | | | MYRISTYL 867-872; | |
| | | | | MYRISTYL | |
| | | | | 964-969; | |
| | | | | AMIDATION | |
| | | | | 780-783; | |
| | | | | AMIDATION | |
| | | | | 867-870; | |
| | | | | LEUCINE_ZIPPER | |
| | | | | 736-757; | |
| DEX0488_{—} | N | 0 - | 211-229, | CAMP_PHOSPHO_{—} | |
| 003.orf.2 | | o1-504; | 1.203; | SITE 317-320; | |
| | | | 28-52, 1.195; | PKC_PHOSPHO_SITE | |
| | | | 261-312, | 50-52; | |
| | | | 1.174; | PKC_PHOSPHO_SITE | |
| | | | 322-337, | 315-317; | |
| | | | 1.166; | PKC_PHOSPHO_SITE | |
| | | | 93-107, 1.16; | 321-323; | |
| | | | 4-17, 1.16; | CK2_PHOSPHO_SITE | |
| | | | 55-66, 1.137; | 18-21; | |
| | | | 145-171, 1.13; | CK2_PHOSPHO_SITE | |
| | | | 342-354, | 172-175; | |
| | | | 1.119; | CK2_PHOSPHO_SITE | |
| | | | 451-474, | 392-395; | |
| | | | 1.106; | MYRISTYL 69-74; | |
| | | | 197-205, | MYRISTYL | |
| | | | 1.105; | 72-77; | |
| | | | 76-88, 1.104; | MYRISTYL 106-111; | |
| | | | 427-436, | MYRISTYL | |
| | | | 1.098; | 111-116; | |
| | | | 121-141, | MYRISTYL 114-119; | |
| | | | 1.098; | MYRISTYL | |
| | | | 370-383, | 181-186; | |
| | | | 1.084; | MYRISTYL 203-208; | |
| | | | 231-239, | MYRISTYL | |
| | | | 1.074; | 291-296; | |
| | | | 407-413, | MYRISTYL 355-360; | |
| | | | 1.057; | MYRISTYL | |
| | | | 68-74, 1.05; | 368-373; | |
| | | | 359-365, | MYRISTYL 402-407; | |
| | | | 1.039; | MYRISTYL | |
| | | | 244-254, | 499-504; | |
| | | | 1.038; | AMIDATION | |
| | | | 481-487, | 315-318; | |
| | | | 1.037; | AMIDATION | |
| | | | | 402-405; | |
| | | | | LEUCINE_ZIPPER | |
| | | | | 271-292; | |
| DEX0488_{—} | N | 0 - | 57-91, 1.216; | CAMP_PHOSPHO_{—} | |
| 003.aa.3 | | o1-887; | 594-612, | SITE 62-65; | |
| | | | 1.203; | CAMP_PHOSPHO_{—} | |
| | | | 411-435, | SITE 700-703; | |
| | | | 1.195; | PKC_PHOSPHO_SITE | |
| | | | 151-189, | 305-307; | |
| | | | 1.189; | PKC_PHOSPHO_SITE | |
| | | | 207-239, | 346-348; | |
| | | | 1.183; | PKC_PHOSPHO_SITE | |
| | | | 644-695, | 356-358; | |
| | | | 1.174; | PKC_PHOSPHO_SITE | |
| | | | 705-720, | 382-384; | |
| | | | 1.166; | PKC_PHOSPHO_SITE | |
| | | | 476-490, 1.16; | 433-435; | |
| | | | 385-400, 1.16; | PKC_PHOSPHO_SITE | |
| | | | 374-383, | 698-700; | |
| | | | 1.153; | PKC_PHOSPHO_SITE | |
| | | | 32-50, 1.152; | 704-706; | |
| | | | 307-318, | CK2_PHOSPHO_SITE | |
| | | | 1.149; | 37-40; | |
| | | | 438-449, | CK2_PHOSPHO_SITE | |
| | | | 1.137; | 54-57; | |
| | | | 128-149, | CK2_PHOSPHO_SITE | |
| | | | 1.131; | 127-130; | |
| | | | 528-554, 1.13; | CK2_PHOSPHO_SITE | |
| | | | 256-303, | 401-404; | |
| | | | 1.126; | CK2_PHOSPHO_SITE | |
| | | | 358-372, 1.12; | 555-558; | |
| | | | 725-737, | CK2_PHOSPHO_SITE | |
| | | | 1.119; | 775-778; | |
| | | | 99-106, 1.117; | MYRISTYL 50-55; | |
| | | | 834-857, | MYRISTYL | |
| | | | 1.106; | 52-57; | |
| | | | 580-588, | MYRISTYL 108-113; | |
| | | | 1.105; | MYRISTYL | |
| | | | 459-471, | 149-154; | |
| | | | 1.104; | MYRISTYL 153-158; | |
| | | | 810-819, | MYRISTYL | |
| | | | 1.098; | 182-187; | |
| | | | 504-524, | MYRISTYL 226-231; | |
| | | | 1.098; | MYRISTYL | |
| | | | 753-766, | 244-249; | |
| | | | 1.084; | MYRISTYL 329-334; | |
| | | | 614-622, | MYRISTYL | |
| | | | 1.074; | 362-367; | |
| | | | 790-796, | MYRISTYL 452-457; | |
| | | | 1.057; | MYRISTYL | |
| | | | 451-457, 1.05; | 455-460; | |
| | | | 742-748, | MYRISTYL 489-494; | |
| | | | 1.039; | MYRISTYL | |
| | | | 627-637, | 494-499; | |
| | | | 1.038; | MYRISTYL 497-502; | |
| | | | 864-870, | MYRISTYL | |
| | | | 1.037; | 564-569; | |
| | | | | MYRISTYL 586-591; | |
| | | | | MYRISTYL | |
| | | | | 674-679; | |
| | | | | MYRISTYL 738-743; | |
| | | | | MYRISTYL | |
| | | | | 751-756; | |
| | | | | MYRISTYL 785-790; | |
| | | | | MYRISTYL | |
| | | | | 882-887; | |
| | | | | AMIDATION | |
| | | | | 698-701; | |
| | | | | AMIDATION | |
| | | | | 785-788; | |
| | | | | LEUCINE_ZIPPER | |
| | | | | 654-675; | |
| DEX0488_{—} | N | 0 - | 211-229, | CAMP_PHOSPHO_{—} | |
| 003.orf.3 | | o1-504; | 1.203; | SITE 317-320; | |
| | | | 28-52, 1.195; | PKC_PHOSPHO_SITE | |
| | | | 261-312, | 50-52; | |
| | | | 1.174; | PKC_PHOSPHO_SITE | |
| | | | 322-337, | 315-317; | |
| | | | 1.166; | PKC_PHOSPHO_SITE | |
| | | | 93-107, 1.16; | 321-323; | |
| | | | 4-17, 1.16; | CK2_PHOSPHO_SITE | |
| | | | 55-66, 1.137; | 18-21; | |
| | | | 145-171, 1.13; | CK2_PHOSPHO_SITE | |
| | | | 342-354, | 172-175; | |
| | | | 1.119; | CK2_PHOSPHO_SITE | |
| | | | 451-474, | 392-395; | |
| | | | 1.106; | MYRISTYL 69-74; | |
| | | | 197-205, | MYRISTYL | |
| | | | 1.105; | 72-77; | |
| | | | 76-88, 1.104; | MYRISTYL 106-111; | |
| | | | 427-436, | MYRISTYL | |
| | | | 1.098; | 111-116; | |
| | | | 121-141, | MYRISTYL 114-119; | |
| | | | 1.098; | MYRISTYL | |
| | | | 370-383, | 181-186; | |
| | | | 1.084; | MYRISTYL 203-208; | |
| | | | 231-239, | MYRISTYL | |
| | | | 1.074; | 291-296; | |
| | | | 407-413, | MYRISTYL 355-360; | |
| | | | 1.057; | MYRISTYL | |
| | | | 68-74, 1.05; | 368-373; | |
| | | | 359-365, | MYRISTYL 402-407; | |
| | | | 1.039; | MYRISTYL | |
| | | | 244-254, | 499-504; | |
| | | | 1.038; | AMIDATION | |
| | | | 481-487, | 315-318; | |
| | | | 1.037; | AMIDATION | |
| | | | | 402-405; | |
| | | | | LEUCINE_ZIPPER | |
| | | | | 271-292; | |
| DEX0488_{—} | N | 0 - | 57-91, 1.216; | CAMP_PHOSPHO_{—} | |
| 003.aa.4 | | o1-887; | 594-612, | SITE 62-65; | |
| | | | 1.203; | CAMP_PHOSPHO_{—} | |
| | | | 411-435, | SITE 700-703; | |
| | | | 1.195; | PKC_PHOSPHO_SITE | |
| | | | 151-189, | 305-307; | |
| | | | 1.189; | PKC_PHOSPHO_SITE | |
| | | | 207-239, | 346-348; | |
| | | | 1.183; | PKC_PHOSPHO_SITE | |
| | | | 644-695, | 356-358; | |
| | | | 1.174; | PKC_PHOSPHO_SITE | |
| | | | 705-720, | 382-384; | |
| | | | 1.166; | PKC_PHOSPHO_SITE | |
| | | | 476-490, 1.16; | 433-435; | |
| | | | 385-400, 1.16; | PKC_PHOSPHO_SITE | |
| | | | 374-383, | 698-700; | |
| | | | 1.153; | PKC_PHOSPHO_SITE | |
| | | | 32-50, 1.152; | 704-706; | |
| | | | 307-318, | CK2_PHOSPHO_SITE | |
| | | | 1.149; | 37-40; | |
| | | | 438-449, | CK2_PHOSPHO_SITE | |
| | | | 1.137; | 54-57; | |
| | | | 128-149, | CK2_PHOSPHO_SITE | |
| | | | 1.131; | 127-130; | |
| | | | 528-554, 1.13; | CK2_PHOSPHO_SITE | |
| | | | 256-303, | 401-404; | |
| | | | 1.126; | CK2_PHOSPHO_SITE | |
| | | | 358-372, 1.12; | 555-558; | |
| | | | 725-737, | CK2_PHOSPHO_SITE | |
| | | | 1.119; | 775-778; | |
| | | | 99-106, 1.117; | MYRISTYL 50-55; | |
| | | | 834-857, | MYRISTYL | |
| | | | 1.106; | 52-57; | |
| | | | 580-588, | MYRISTYL 108-113; | |
| | | | 1.105; | MYRISTYL | |
| | | | 459-471, | 149-154; | |
| | | | 1.104; | MYRISTYL 153-158; | |
| | | | 810-819, | MYRISTYL | |
| | | | 1.098; | 182-187; | |
| | | | 504-524, | MYRISTYL 226-231; | |
| | | | 1.098; | MYRISTYL | |
| | | | 753-766, | 244-249; | |
| | | | 1.084; | MYRISTYL 329-334; | |
| | | | 614-622, | MYRISTYL | |
| | | | 1.074; | 362-367; | |
| | | | 790-796, | MYRISTYL 452-457; | |
| | | | 1.057; | MYRISTYL | |
| | | | 451-457, 1.05; | 455-460; | |
| | | | 742-748, | MYRISTYL 489-494; | |
| | | | 1.039; | MYRISTYL | |
| | | | 627-637, | 494-499; | |
| | | | 1.038; | MYRISTYL 497-502; | |
| | | | 864-870, | MYRISTYL | |
| | | | 1.037; | 564-569; | |
| | | | | MYRISTYL 586-591; | |
| | | | | MYRISTYL | |
| | | | | 674-679; | |
| | | | | MYRISTYL 738-743; | |
| | | | | MYRISTYL | |
| | | | | 751-756; | |
| | | | | MYRISTYL 785-790; | |
| | | | | MYRISTYL | |
| | | | | 882-887; | |
| | | | | AMIDATION | |
| | | | | 698-701; | |
| | | | | AMIDATION | |
| | | | | 785-788; | |
| | | | | LEUCINE_ZIPPER | |
| | | | | 654-675; | |
| DEX0488_{—} | N | 0 - | 211-229, | CAMP_PHOSPHO_{—} | |
| 003.orf.4 | | o1-504; | 1.203; | SITE 317-320; | |
| | | | 28-52, 1.195; | PKC_PHOSPHO_SITE | |
| | | | 261-312, | 50-52; | |
| | | | 1.174; | PKC_PHOSPHO_SITE | |
| | | | 322-337, | 315-317; | |
| | | | 1.166; | PKC_PHOSPHO_SITE | |
| | | | 93-107, 1.16; | 321-323; | |
| | | | 4-17, 1.16; | CK2_PHOSPHO_SITE | |
| | | | 55-66, 1.137; | 18-21; | |
| | | | 145-171, 1.13; | CK2_PHOSPHO_SITE | |
| | | | 342-354, | 172-175; | |
| | | | 1.119; | CK2_PHOSPHO_SITE | |
| | | | 451-474, | 392-395; | |
| | | | 1.106; | MYRISTYL 69-74; | |
| | | | 197-205, | MYRISTYL | |
| | | | 1.105; | 72-77; | |
| | | | 76-88, 1.104; | MYRISTYL 106-111; | |
| | | | 427-436, | MYRISTYL | |
| | | | 1.098; | 111-116; | |
| | | | 121-141, | MYRISTYL 114-119; | |
| | | | 1.098; | MYRISTYL | |
| | | | 370-383, | 181-186; | |
| | | | 1.084; | MYRISTYL 203-208; | |
| | | | 231-239, | MYRISTYL | |
| | | | 1.074; | 291-296; | |
| | | | 407-413, | MYRISTYL 355-360; | |
| | | | 1.057; | MYRISTYL | |
| | | | 68-74, 1.05; | 368-373; | |
| | | | 359-365, | MYRISTYL 402-407; | |
| | | | 1.039; | MYRISTYL | |
| | | | 244-254, | 499-504; | |
| | | | 1.038; | AMIDATION | |
| | | | 481-487, | 315-318; | |
| | | | 1.037; | AMIDATION | |
| | | | | 402-405; | |
| | | | | LEUCINE_ZIPPER | |
| | | | | 271-292; | |
| DEX0488 | N | 0 - | 57-91, 1.216; | CAMP PHOSPHO_{—} | |
| 003.aa.5 | | o1-887; | 594-612, | SITE 62-65; | |
| | | | 1.203; | CAMP_PHOSPHO_{—} | |
| | | | 411-435, | SITE 700-703; | |
| | | | 1.195; | PKC_PHOSPHO_SITE | |
| | | | 151-189, | 305-307; | |
| | | | 1.189; | PKC_PHOSPHO_SITE | |
| | | | 207-239, | 346-348; | |
| | | | 1.183; | PKC_PHOSPHO_SITE | |
| | | | 644-695, | 356-358; | |
| | | | 1.174; | PKC_PHOSPHO_SITE | |
| | | | 705-720, | 382-384; | |
| | | | 1.166; | PKC_PHOSPHO_SITE | |
| | | | 476-490, 1.16; | 433-435; | |
| | | | 385-400, 1.16; | PKC_PHOSPHO_SITE | |
| | | | 374-383, | 698-700; | |
| | | | 1.153; | PKC_PHOSPHO_SITE | |
| | | | 32-50, 1.152; | 704-706; | |
| | | | 307-318, | CK2_PHOSPHO_SITE | |
| | | | 1.149; | 37-40; | |
| | | | 438-449, | CK2_PHOSPHO_SITE | |
| | | | 1.137; | 54-57; | |
| | | | 128-149, | CK2_PHOSPHO_SITE | |
| | | | 1.131; | 127-130; | |
| | | | 528-554, 1.13; | CK2_PHOSPHO_SITE | |
| | | | 256-303, | 401-404; | |
| | | | 1.126; | CK2_PHOSPHO_SITE | |
| | | | 357-372, 1.12; | 555-558; | |
| | | | 725-737, | CK2_PHOSPHO_SITE | |
| | | | 1.119; | 775-778; | |
| | | | 99-106, 1.117; | MYRISTYL 50-55; | |
| | | | 834-857, | MYRISTYL | |
| | | | 1.106; | 52-57; | |
| | | | 580-588, | MYRISTYL 108-113; | |
| | | | 1.105; | MYRISTYL | |
| | | | 459-471, | 149-154; | |
| | | | 1.104; | MYRISTYL 153-158; | |
| | | | 810-819, | MYRISTYL | |
| | | | 1.098; | 182-187; | |
| | | | 504-524, | MYRISTYL 226-231; | |
| | | | 1.098; | MYRISTYL | |
| | | | 753-766, | 244-249; | |
| | | | 1.084; | MYRISTYL 329-334; | |
| | | | 614-622, | MYRISTYL | |
| | | | 1.074; | 362-367; | |
| | | | 790-796, | MYRISTYL 452-457; | |
| | | | 1.057; | MYRISTYL | |
| | | | 451-457, 1.05; | 455-460; | |
| | | | 742-748, | MYRISTYL 489-494; | |
| | | | 1.039; | MYRISTYL | |
| | | | 627-637, | 494-499; | |
| | | | 1.038; | MYRISTYL 497-502; | |
| | | | 864-870, | MYRISTYL | |
| | | | 1.037; | 564-569; | |
| | | | | MYRISTYL 586-591; | |
| | | | | MYRISTYL | |
| | | | | 674-679; | |
| | | | | MYRISTYL 738-743; | |
| | | | | MYRISTYL | |
| | | | | 751-756; | |
| | | | | MYRISTYL 785-790; | |
| | | | | MYRISTYL | |
| | | | | 882-887; | |
| | | | | AMIDATION | |
| | | | | 698-701; | |
| | | | | AMIDATION | |
| | | | | 785-788; | |
| | | | | LEUCINE_ZIPPER | |
| | | | | 654-675; | |
| DEX0488_{—} | N | 0 - | 211-229, | CAMP_PHOSPHO_{—} | |
| 003.orf.5 | | o1-504; | 1.203; | SITE 317-320; | |
| | | | 28-52, 1.195, | PKC_PHOSPHO_SITE | |
| | | | 261-312, | 50-52; | |
| | | | 1.174; | PKC_PHOSPHO_SITE | |
| | | | 322-337, | 315-317; | |
| | | | 1.166; | PKC_PHOSPHO_SITE | |
| | | | 93-107, 1.16; | 321-323; | |
| | | | 4-17, 1.16; | CK2_PHOSPHO_SITE | |
| | | | 55-66, 1.137; | 18-21; | |
| | | | 145-171, 1.13; | CK2_PHOSPHO_SITE | |
| | | | 342-354, | 172-175; | |
| | | | 1.119; | CK2_PHOSPHO_SITE | |
| | | | 451-474, | 392-395; | |
| | | | 1.106; | MYRISTYL 69-74; | |
| | | | 197-205, | MYRISTYL | |
| | | | 1.105; | 72-77; | |
| | | | 76-88, 1.104, | MYRISTYL 106-111; | |
| | | | 427-436, | MYRISTYL | |
| | | | 1.098; | 111-116; | |
| | | | 121-141, | MYRISTYL 114-119; | |
| | | | 1.098; | MYRISTYL | |
| | | | 370-383, | 181-186; | |
| | | | 1.084; | MYRISTYL 203-208; | |
| | | | 231-239, | MYRISTYL | |
| | | | 1.074; | 291-296; | |
| | | | 407-413, | MYRISTYL 355-360; | |
| | | | 1.057; | MYRISTYL | |
| | | | 68-74, 1.05; | 368-373; | |
| | | | 359-365, | MYRISTYL 402-407; | |
| | | | 1.039; | MYRISTYL | |
| | | | 244-254, | 499-504; | |
| | | | 1.038; | AMIDATION | |
| | | | 481-487, | 315-318; | |
| | | | 1.037; | AMIDATION | |
| | | | | 402-405; | |
| | | | | LEUCINE_ZIPPER | |
| | | | | 271-292; | |
| DEX0488_{—} | Y | 0 - | 6-28, 1.22; | CAMP_PHOSPHO_{—} | tsp_1 421-470; |
| 003.aa.6 | | o1-471; | 139-173, | SITE 144-147; | TSP1 420-471; TSP1 |
| | | | 1.216; | PKC_PHOSPHO_SITE | 417-471; |
| | | | 233-271, | 36-38; | |
| | | | 1.189; | PKC_PHOSPHO_SITE | |
| | | | 462-468, | 48-50; | |
| | | | 1.185; | PKC_PHOSPHO_SITE | |
| | | | 289-321, | 387-389; | |
| | | | 1.183; | CK2_PHOSPHO_SITE | |
| | | | 114-132, | 119-122; | |
| | | | 1.152; | CK2_PHOSPHO_SITE | |
| | | | 389-400, | 136-139; | |
| | | | 1.149; | CK2_PHOSPHO_SITE | |
| | | | 406-423, | 209-212; | |
| | | | 1.146; | CK2_PHOSPHO_SITE | |
| | | | 442-448, | 410-413; | |
| | | | 1.135; | CK2_PHOSPHO_SITE | |
| | | | 210-231, | 414-417; | |
| | | | 1.131; | MYRISTYL 26-31; | |
| | | | 338-385, | MYRISTYL | |
| | | | 1.126; | 74-79; | |
| | | | 181-188, | MYRISTYL 132-137; | |
| | | | 1.117; | MYRISTYL | |
| | | | 425-436, | 134-139; | |
| | | | 1.114; | MYRISTYL 190-195; | |
| | | | 31-46, 1.092; | MYRISTYL | |
| | | | 68-76, 1.088; | 231-236; | |
| | | | 54-66, 1.082; | MYRISTYL 235-240; | |
| | | | | MYRISTYL | |
| | | | | 264-269; | |
| | | | | MYRISTYL 308-313; | |
| | | | | MYRISTYL | |
| | | | | 326-331; | |
| | | | | MYRISTYL 427-432; | |
| | | | | MYRISTYL | |
| | | | | 430-435; | |
| DEX0488_{—} | N | 0 - | | ASN_GLYCOSYLATION | |
| 003.orf.6 | | o1-458; | | 69-72; | |
| | | | | ASN_GLYCOSYLATION | |
| | | | | 84-87; | |
| | | | | CAMP_PHOSPHO_{—} | |
| | | | | SITE 250-253; | |
| | | | | CAMP_PHOSPHO_{—} | |
| | | | | SITE 427-430; | |
| | | | | PKC_PHOSPHO_SITE | |
| | | | | 37-39; | |
| | | | | PKC_PHOSPHO_SITE | |
| | | | | 103-105; | |
| | | | | PKC_PHOSPHO_SITE | |
| | | | | 142-144; | |
| | | | | PKC_PHOSPHO_SITE | |
| | | | | 154-156; | |
| | | | | CK2_PHOSPHO_SITE | |
| | | | | 63-66; | |
| | | | | CK2_PHOSPHO_SITE | |
| | | | | 225-228; | |
| | | | | CK2_PHOSPHO_SITE | |
| | | | | 242-245; | |
| | | | | CK2_PHOSPHO_SITE | |
| | | | | 315-318; | |
| | | | | MYRISTYL 2-7; | |
| | | | | MYRISTYL 77-82; | |
| | | | | MYRISTYL | |
| | | | | 82-87; | |
| | | | | MYRISTYL 132-137; | |
| | | | | MYRISTYL | |
| | | | | 180-185; | |
| | | | | MYRISTYL 238-243; | |
| | | | | MYRISTYL | |
| | | | | 240-245; | |
| | | | | MYRISTYL 296-301; | |
| | | | | MYRISTYL | |
| | | | | 337-342; | |
| | | | | MYRISTYL 341-346; | |
| | | | | MYRISTYL | |
| | | | | 370-375; | |
| | | | | MYRISTYL 414-419; | |
| | | | | MYRISTYL | |
| | | | | 432-437; RGD | |
| | | | | 5-7; | |
| DEX0488_{—} | N | 0 - | 34-55, 1.131; | MYRISTYL 32-37; | |
| 003.aa.7 | | o1-58; | 20-26, 1.12; | AMIDATION | |
| | | | | 14-17; | |
| DEX0488_{—} | N | 0 - | 32-46, 1.178; | PKC_PHOSPHO_SITE | |
| 003.orf.7 | | o1-79; | 21-29, 1.134; | 32-34; | |
| | | | 48-70, 1.088; | CK2_PHOSPHO_SITE | |
| | | | | 13-16; | |
| | | | | MYRISTYL 14-19; | |
| | | | | MYRISTYL | |
| | | | | 57-62; | |
| DEX0488_{—} | Y | 0 - | 6-23, 1.239; | ASN_GLYCOSYLATION | PNCREATITSAP 24-42; |
| 004.aa.1 | | o1-118; | 64-76, 1.141; | 50-53; | PNCREATITSAP |
| | | | 102-111, | PKC_PHOSPHO_SITE | 51-74; |
| | | | 1.094; | 5-7; | PNCREATITSAP 77-99 |
| | | | 55-61, 1.082; | PKC_PHOSPHO_SITE | lectin_c 47-116; |
| | | | 27-36, 1.08; | 72-74; | 37-98; |
| | | | 38-46, 1.08; | CK2_PHOSPHO_SITE | |
| | | | 88-100, 1.07; | 52-55; | |
| | | | 79-86, 1.043; | CK2_PHOSPHO_SITE | |
| | | | | 72-75; | |
| | | | | CK2_PHOSPHO_SITE | |
| | | | | 78-81; | |
| | | | | MYRISTYL 64-69; | |
| DEX0488_{—} | N | 7 - | 320-368, | ASN_GLYCOSYLATION | FRIZZLED 167-189; |
| 005.aa.1 | | o1-165; | 1.312; | 4-7; | FRIZZLED 195-217; |
| | | tm166-188; | 382-406, | ASN_GLYCOSYLATION | FRIZZLED 250-274; |
| | | i189-200; | 1.249; | 318-321; | FRIZZLED 293-316; |
| | | tm201-220; | 163-193, | CAMP_PHOSPHO_{—} | FRIZZLED 338-360; |
| | | o221-254; | 1.245; | SITE 279-282; | FRIZZLED 379-400; |
| | | tm255-277; | 40-78, 1.223; | PKC_PHOSPHO_SITE | FRIZZLED 441-461; |
| | | i278-289; | 519-530, | 462-464; | Frizzled 154-479; |
| | | tm290-312; | 1.222; | PKC_PHOSPHO_SITE | Fz 1-96; FRI 1-100; |
| | | o313-335; | 197-223, | 485-487; | G_PROTEIN_RECEP_F2_4 |
| | | tm336-358; | 1.216; | CK2_PHOSPHO_SITE | 161-468; FZ 1-98; |
| | | i359-378; | 485-517, | 50-53; | |
| | | tm379-401; | 1.187; | CK2_PHOSPHO_SITE | |
| | | o402-438; | 245-259, | 465-468; | |
| | | tm439-461; | 1.173; | TYR_PHOSPHO_SITE | |
| | | i462-533; | 414-432, 1.16; | 62-69; | |
| | | | 139-154, | MYRISTYL 143-148; | |
| | | | 1.156; | MYRISTYL | |
| | | | 436-461, | 384-389; | |
| | | | 1.146; | MYRISTYL 461-466; | |
| | | | 89-104, 1.141; | AMIDATION | |
| | | | 288-299, 1.14; | 277-280; | |
| | | | 303-309, | | |
| | | | 1.137; | | |
| | | | 236-243, | | |
| | | | 1.131; | | |
| | | | 264-277, | | |
| | | | 1.123; | | |
| | | | 16-38, 1.106; | | |
| | | | 124-131, | | |
| | | | 1.098; | | |
| | | | 107-112, | | |
| | | | 1.022; | | |
| DEX0488_{—} | N | 7 - | 387-435, | ASN_GLYCOSYLATION | FRIZZLED 234-256; |
| 005.orf.1 | | o1-232; | 1.312; | 71-74; | FRIZZLED 262-284; |
| | | tm233-255; | 449-473, | ASN_GLYCOSYLATION | FRIZZLED 317-341; |
| | | i256-267; | 1.249; | 385-388; | FRIZZLED 360-383; |
| | | tm268-287; | 230-260, | CAMP_PHOSPHO_{—} | FRIZZLED 405-427; |
| | | o288-321; | 1.245; | SITE 346-349; | FRIZZLED 446-467; |
| | | tm322-344; | 107-145, | PKC_PHOSPHO_SITE | FRIZZLED 508-528; |
| | | i345-356; | 1.223; | 21-23; | Frizzled 221-546; |
| | | tm357-379; | 586-597, | PKC_PHOSPHO_SITE | Fz 47-163; FRI 56-167; |
| | | o380-402; | 1.222; | 529-531; | G_PROTEIN_RECEP_F2_4 |
| | | tm403-425; | 264-290, | PKC_PHOSPHO_SITE | 228-535; FZ 52-165; |
| | | i426-445; | 1.216; | 552-554; | |
| | | tm446-468; | 38-65, 1.21; | CK2_PHOSPHO_SITE | |
| | | o469-505; | 552-584, | 13-16; | |
| | | tm506-528; | 1.187; | CK2_PHOSPHO_SITE | |
| | | i529-600; | 312-326, | 117-120; | |
| | | | 1.173; | CK2_PHOSPHO_SITE | |
| | | | 481-499, 1.16; | 532-535; | |
| | | | 206-221, | TYR_PHOSPHO_SITE | |
| | | | 1.156; | 129-136; | |
| | | | 503-528, | MYRISTAL 210-215; | |
| | | | 1.146; | MYRISTAL | |
| | | | 156-171, | 451-456; | |
| | | | 1.141; | MYRISTAL 528-533; | |
| | | | 355-366, 1.14; | AMIDATION | |
| | | | 370-376, | 344-347; | |
| | | | 1.137; | | |
| | | | 303-310, | | |
| | | | 1.131; | | |
| | | | 331-344, | | |
| | | | 1.123; | | |
| | | | 83-105, 1.106; | | |
| | | | 191-198, | | |
| | | | 1.098; | | |
| | | | 22-28, 1.053; | | |
| | | | 174-179, | | |
| | | | 1.022; | | |
| DEX0488_{—} | N | 1 - | | ASN_GLYCOSYLATION | ig 43-110; IGc1 |
| 006.aa.1 | | o1-145; | | 4-7; | 45-118; IG_LIKE |
| | | tm146-168; | | PKC_PHOSPHO_SITE | 29-125; IG_MHC |
| | | i169-199; | | 6-8; | 106-112; |
| | | | | PKC_PHOSPHO_SITE | |
| | | | | 9-11; | |
| | | | | PKC_PHOSPHO_SITE | |
| | | | | 120-122; | |
| | | | | CK2_PHOSPHO_SITE | |
| | | | | 37-40; | |
| | | | | CK2_PHOSPHO_SITE | |
| | | | | 135-138; | |
| | | | | CK2_PHOSPHO_SITE | |
| | | | | 179-182; | |
| | | | | TYR_PHOSPHO_SITE | |
| | | | | 24-32; | |
| | | | | MYRISTYL 68-73; | |
| | | | | MYRISTYL | |
| | | | | 103-108; | |
| | | | | MYRISTYL 146-151; | |
| DEX0488_{—} | N | 0 - | 17-34, 1.196; | ASN_GLYCOSYLATION | ATP_GTP_A 172-179; |
| 006.orf.1 | | o1-253; | 182-190, | 37-40; | |
| | | | 1.139; | ASN_GLYCOSYLATION | |
| | | | 57-70, 1.13; | 150-153; | |
| | | | 193-217, | CAMP_PHOSPHO_{—} | |
| | | | 1.123; | SITE 40-43; | |
| | | | 73-88, 1.115; | PKC_PHOSPHO_SITE | |
| | | | 244-250, | 39-41; | |
| | | | 1.109; | PKC_PHOSPHO_SITE | |
| | | | 118-123, | 72-74; | |
| | | | 1.073; 8-13, | PKC_PHOSPHO_SITE | |
| | | | 1.045; | 92-94; | |
| | | | 153-158, | PKC_PHOSPHO_SITE | |
| | | | 1.041; | 132-134; | |
| | | | | PKC_PHOSPHO_SITE | |
| | | | | 152-154; | |
| | | | | PKC_PHOSPHO_SITE | |
| | | | | 179-181; | |
| | | | | PKC_PHOSPHO_SITE | |
| | | | | 180-182; | |
| | | | | PKC_PHOSPHO_SITE | |
| | | | | 208-210; | |
| | | | | PKC_PHOSPHO_SITE | |
| | | | | 220-222; | |
| | | | | CK2_PHOSPHO_SITE | |
| | | | | 39-42; | |
| | | | | CK2_PHOSPHO_SITE | |
| | | | | 132-135; | |
| | | | | CK2_PHOSPHO_SITE | |
| | | | | 220-223; | |
| | | | | MYRISTYL 83-88; | |
| | | | | MYRISTYL | |
| | | | | 114-119; | |
| | | | | MYRISTYL 115-120; | |
| | | | | MYRISTYL | |
| | | | | 127-132; | |
| | | | | MYRISTYL 160-165; | |
| DEX0488_{—} | N | 0 - | 29-66, 1.301; | ASN_GLYCOSYLATION | |
| 007.aa.1 | | o1-179; | 95-102, 1.194; | 92-95; | |
| | | | 149-158, | ASN_GLYCOSYLATION | |
| | | | 1.129; | 108-111; | |
| | | | 132-147, | ASN_GLYCOSYLATION | |
| | | | 1.129; | 133-136; | |
| | | | 12-21, 1.12; | CAMP_PHOSPHO_{—} | |
| | | | 120-126, | SITE 158-161; | |
| | | | 1.078; | PKC_PHOSPHO_SITE | |
| | | | 78-88, 1.042; | 160-162; | |
| | | | | PKC_PHOSPHO_SITE | |
| | | | | 165-167; | |
| | | | | CK2_PHOSPHO_SITE | |
| | | | | 71-74; | |
| | | | | CK2_PHOSPHO_SITE | |
| | | | | 110-113; | |
| | | | | CK2_PHOSPHO_SITE | |
| | | | | 122-125; | |
| | | | | TYR_PHOSPHO_SITE | |
| | | | | 102-109; | |
| | | | | MYRISTYL 67-72; | |
| DEX0488_{—} | Y | 0 - | 5-40, 1.301; | ASN_GLYCOSYLATION | |
| 007.orf.1 | | o1-153; | 69-76, 1.194; | 66-69; | |
| | | | 123-132, | ASN_GLYCOSYLATION | |
| | | | 1.129; | 82-85; | |
| | | | 106-121, | ASN_GLYCOSYLATION | |
| | | | 1.129; | 107-110; | |
| | | | 94-100, 1.078; | CAMP_PHOSPHO_{—} | |
| | | | 52-62, 1.042; | SITE 132-135; | |
| | | | | PKC_PHOSPHO_SITE | |
| | | | | 134-136; | |
| | | | | PKC_PHOSPHO_SITE | |
| | | | | 139-141; | |
| | | | | CK2_PHOSPHO_SITE | |
| | | | | 45-48; | |
| | | | | CK2_PHOSPHO_SITE | |
| | | | | 84-87; | |
| | | | | CK2_PHOSPHO_SITE | |
| | | | | 96-99; | |
| | | | | TYR_PHOSPHO_SITE | |
| | | | | 76-83; | |
| | | | | MYRISTYL 41-46; | |
| DEX0488_{—} | N | 0 - | 52-73, 1.178; | MYRISTYL 12-17; | |
| 008.aa.1 | | o1-79; | 18-33, 1.147; | MYRISTYL | |
| | | | 38-43, 1.037; | 19-24; | |
| | | | | MYRISTYL 47-52; | |
| | | | | AMIDATION | |
| | | | | 74-77; | |
| DEX0488_{—} | N | 0 - | | PKC_PHOSPHO_SITE | |
| 008.orf.1 | | o1-79; | | 9-11; | |
| | | | | MYRISTYL 5-10; | |
| | | | | MYRISTYL | |
| | | | | 8-13; | |
| | | | | MYRISTYL 12-17; | |
| | | | | MYRISTYL | |
| | | | | 19-24; | |
| | | | | MYRISTYL 47-52; | |
| | | | | AMIDATION | |
| | | | | 74-77; | |
| DEX0488_{—} | N | 0 - | 103-124, | PKC_PHOSPHO_SITE | |
| 008.aa.2 | | o1-130; | 1.178; | 26-28; | |
| | | | 32-45, 1.149; | CK2_PHOSPHO_SITE | |
| | | | 64-84, 1.147; | 11-14; | |
| | | | 12-22, 1.079; | MYRISTYL 22-27; | |
| | | | 89-94, 1.037; | MYRISTYL | |
| | | | | 70-75; | |
| | | | | MYRISTYL 98-103; | |
| | | | | AMIDATION | |
| | | | | 125-128; | |
| DEX0488_{—} | N | 0 - | 103-114, | PKC_PHOSPHO_SITE | |
| 008.aa.3 | | o1-117; | 1.178; | 26-28; | |
| | | | 32-45, 1.149; | CK2 PHOSPHO SITE | |
| | | | 64-84, 1.147; | 11-14; | |
| | | | 12-22, 1.079; | MYRISTYL 22-27; | |
| | | | 89-94, 1.037; | MYRISTYL | |
| | | | | 70-75; | |
| | | | | MYRISTYL 98-103; | |
| DEX0488_{—} | N | 0 - | 36-47, 1.172; | CAMP_PHOSPHO_{—} | ER_TARGET 139-142; |
| 009.aa.1 | | o1-142; | 119-137, | SITE 64-67; | |
| | | | 1.163; 4-15, | PKC_PHOSPHO_SITE | |
| | | | 1.151; 93-101, | 132-134; | |
| | | | 1.137; | CK2_PHOSPHO_SITE | |
| | | | 77-84, 1.119; | 138-141; | |
| | | | 55-66, 1.108; | TYR_PHOSPHO_SITE | |
| | | | | 33-40; | |
| | | | | MYRISTYL 117-122; | |
| | | | | MYRISTYL | |
| | | | | 125-130; | |
| | | | | AMIDATION 30-33; | |
| DEX0488_{—} | N | 0 - | 64-77, 1.223; | PKC_PHOSPHO_SITE | |
| 009.orf.1 | | o1-154; | 104-131, | 15-17; | |
| | | | 1.153; | CK2_PHOSPHO_SITE | |
| | | | 137-151, | 40-43; | |
| | | | 1.152; | CK2_PHOSPHO_SITE | |
| | | | 21-38, 1.141; | 54-57; | |
| | | | 47-59, 1.065; | MYRISTYL 12-17; | |
| | | | 88-95, 1.046; | MYRISTYL | |
| | | | | 20-25; | |
| | | | | MYRISTYL 31-36; | |
| | | | | MYRISTYL | |
| | | | | 36-41; | |
| | | | | MYRISTYL 136-141; | |
| | | | | AMIDATION 15-18; | |
| DEX0488_{—} | N | 0 - | 125-144, 1.22; | CAMP_PHOSPHO_{—} | TIFACTORIIB 27-47; |
| 010.aa.1 | | o1-182; | 31-49, 1.178; | SITE 116-119; | TIFACTORIIB 49-62; |
| | | | 7-27, 1.136; | CAMP_PHOSPHO_{—} | TIFACTORIIB 63-84; |
| | | | 162-167, | SITE 154-157; | |
| | | | 1.069; | PKC_PHOSPHO_SITE | |
| | | | 72-78, 1.054; | 4-6; | |
| | | | | PKC_PHOSPHO_SITE | |
| | | | | 115-117; | |
| | | | | PKC_PHOSPHO_SITE | |
| | | | | 148-150; | |
| | | | | CK2_PHOSPHO_SITE | |
| | | | | 5-8; | |
| | | | | CK2_PHOSPHO_SITE | |
| | | | | 76-79; | |
| | | | | CK2_PHOSPHO_SITE | |
| | | | | 92-95; | |
| | | | | CK2_PHOSPHO_SITE | |
| | | | | 176-179; | |
| | | | | MYRISTYL 38-43; | |
| | | | | MYRISTYL | |
| | | | | 87-92; | |
| DEX0488_{—} | N | 0 - | 26-55, 1.182; | ASN_GLYCOSYLATION | DH_2 1-86; DH_1 |
| 011.aa.1 | | o1-403; | 324-352, | 353-356; | 34-59; |
| | | | 1.167; | CAMP PHOSPHO | |
| | | | 94-124, 1.16; | SITE 56-59; | |
| | | | 136-148, | CAMP_PHOSPHO_{—} | |
| | | | 1.141; | SITE 87-90; | |
| | | | 196-206, | CAMP_PHOSPHO_{—} | |
| | | | 1.139; | SITE 276-279; | |
| | | | 230-243, 1.13; | CAMP_PHOSPHO_{—} | |
| | | | 389-400, | SITE 280-283; | |
| | | | 1.121; | PKC_PHOSPHO_SITE | |
| | | | 209-217, | 75-77; | |
| | | | 1.118; | PKC_PHOSPHO_SITE | |
| | | | 168-189, | 113-115; | |
| | | | 1.115; | PKC_PHOSPHO_SITE | |
| | | | 14-23, 1.098; | 158-160; | |
| | | | 126-132, | PKC_PHOSPHO_SITE | |
| | | | 1.081; | 171-173; | |
| | | | 361-374, | PKC_PHOSPHO_SITE | |
| | | | 1.081; | 278-280; | |
| | | | 246-252, | PKC_PHOSPHO_SITE | |
| | | | 1.067; | 279-281; | |
| | | | 70-82, 1.065; | PKC_PHOSPHO_SITE | |
| | | | 152-158, | 291-293; | |
| | | | 1.063; 6-12, | PKC_PHOSPHO_SITE | |
| | | | 1.063; | 366-368; | |
| | | | 282-289, 1.06; | CK2_PHOSPHO_SITE | |
| | | | | 33-36; | |
| | | | | CK2_PHOSPHO_SITE | |
| | | | | 59-62; | |
| | | | | CK2_PHOSPHO_SITE | |
| | | | | 67-70; | |
| | | | | CK2_PHOSPHO_SITE | |
| | | | | 75-78; | |
| | | | | CK2_PHOSPHO_SITE | |
| | | | | 125-128; | |
| | | | | CK2_PHOSPHO_SITE | |
| | | | | 219-222; | |
| | | | | CK2_PHOSPHO_SITE | |
| | | | | 313-316; | |
| | | | | CK2_PHOSPHO_SITE | |
| | | | | 375-378; | |
| | | | | TYR_PHOSPHO_SITE | |
| | | | | 94-101; | |
| | | | | TYR_PHOSPHO_SITE | |
| | | | | 242-250; | |
| | | | | MYRISTYL 105-110; | |
| | | | | MYRISTYL | |
| | | | | 305-310; | |
| DEX0488_{—} | N | 0 - | | CK2_PHOSPHO_SITE | |
| 012.aa.1 | | o1-47; | | 7-10; | |
| DEX0488_{—} | N | 1 - | | PKC_PHOSPHO_SITE | |
| 012.orf.1 | | o1-38; | | 24-26; | |
| | | tm39-61; | | | |
| | | i62-81; | | | |
| DEX0488_{—} | N | 0 - | 163-197, | ASN_GLYCOSYLATION | POLO_box 30-99; |
| 013.aa.1 | | o1-207; | 1.183; | 42-45; | POLO_BOX 30-99; |
| | | | 117-145, | ASN_GLYCOSYLATION | |
| | | | 1.154; | 201-204; | |
| | | | 103-110, | PKC_PHOSPHO_SITE | |
| | | | 1.149; | 5-7; | |
| | | | 77-97, 1.144; | PKC_PHOSPHO_SITE | |
| | | | 34-67, 1.141; | 13-15; | |
| | | | 20-28, 1.13; | PKC_PHOSPHO_SITE | |
| | | | 150-157, | 76-78; | |
| | | | 1.055; | PKC_PHOSPHO_SITE | |
| | | | | 108-110; | |
| | | | | PKC_PHOSPHO_SITE | |
| | | | | 113-115; | |
| | | | | CK2_PHOSPHO_SITE | |
| | | | | 13-16; | |
| | | | | CK2_PHOSPHO_SITE | |
| | | | | 66-69; | |
| | | | | CK2_PHOSPHO_SITE | |
| | | | | 100-103; | |
| | | | | MYRISTYL 144-149; | |
| | | | | MYRISTYL | |
| | | | | 147-152; | |
| | | | | MYRISTYL 161-166; | |
| | | | | MYRISTYL | |
| | | | | 172-177; | |
| DEX0488_{—} | N | 0 - | | CAMP_PHOSPHO_{—} | |
| 013.orf.1 | | o1-199; | | SITE 50-53; | |
| | | | | PKC_PHOSPHO_SITE | |
| | | | | 63-65; | |
| | | | | CK2_PHOSPHO_SITE | |
| | | | | 86-89; | |
| | | | | MYRISTYL 99-104; | |
| | | | | MYRISTYL | |
| | | | | 144-149; | |
| | | | | MYRISTYL 147-152; | |
| | | | | MYRISTYL | |
| | | | | 151-156; | |
| | | | | MYRISTYL 153-158; | |
| | | | | MYRISTYL | |
| | | | | 164-169; | |
| DEX0488_{—} | N | 0 - | 117-145, | ASN_GLYCOSYLATION | POLO_box 30-89; |
| 013.aa.2 | | o1-175; | 1.154; | 42-45; | POLO_BOX 30-98; |
| | | | 34-67, 1.141; | PKC_PHOSPHO_SITE | |
| | | | 20-28, 1.13; | 5-7; | |
| | | | 163-172; | PKC_PHOSPHO_SITE | |
| | | | 1.101; | 13-15; | |
| | | | 82-91, 1.101; | PKC_PHOSPHO_SITE | |
| | | | 94-110, 1.07; | 76-78; | |
| | | | 150-157, | PKC_PHOSPHO_SITE | |
| | | | 1.055; | 108-110; | |
| | | | | PKC_PHOSPHO_SITE | |
| | | | | 113-115; | |
| | | | | CK2_PHOSPHO_SITE | |
| | | | | 13-16; | |
| | | | | CK2_PHOSPHO_SITE | |
| | | | | 66-69; | |
| | | | | MYRISTYL 144-149; | |
| | | | | MYRISTYL | |
| | | | | 147-152; | |
| | | | | MYRISTYL 161-166; | |
| DEX0488 | N | 0 - | | CAMP_PHOSPHO_{—} | |
| 013.orf.2 | | o1-162; | | SITE 50-53; | |
| | | | | PKC_PHOSPHO_SITE | |
| | | | | 63-65; | |
| | | | | PKC_PHOSPHO_SITE | |
| | | | | 157-159; | |
| | | | | CK2_PHOSPHO_SITE | |
| | | | | 86-89; | |
| | | | | MYRISTYL 99-104; | |
| | | | | MYRISTYL | |
| | | | | 144-149; | |
| | | | | MYRISTYL 147-152; | |
| | | | | MYRISTYL | |
| | | | | 152-157; | |
| | | | | MYRISTYL 153-158; | |
| DEX0488_{—} | N | 0 - | 101-125, | ASN_GLYCOSYLATION | |
| 014.aa.1 | | o1-128; | 1.227; 8-31, | 42-45; | |
| | | | 1.204; 85-96, | ASN_GLYCOSYLATION | |
| | | | 1.16; 62-80, | 61-64; | |
| | | | 1.129; 45-55, | PKC_PHOSPHO_SITE | |
| | | | 1.104; | 5-7; | |
| | | | | PKC_PHOSPHO_SITE | |
| | | | | 85-87; | |
| | | | | CK2_PHOSPHO_SITE | |
| | | | | 35-38; | |
| | | | | MYRISTYL 12-17; | |
| | | | | MYRISTYL | |
| | | | | 31-36; | |
| | | | | MYRISTYL 53-58; | |
| | | | | MYRISTYL | |
| | | | | 55-60; | |
| | | | | MYRISTYL 59-64; | |
| | | | | MYRISTYL | |
| | | | | 81-86; | |
| DEX0488_{—} | N | 0 - | 8-31, 1.204; | ASN_GLYCOSYLATION | |
| 014.aa.2 | | o1-95; | 62-87, 1.146; | 42-45; | |
| | | | 45-55, 1.104; | ASN_GLYCOSYLATION | |
| | | | | 61-64; | |
| | | | | PKC_PHOSPHO_SITE | |
| | | | | 5-7; | |
| | | | | CK2_PHOSPHO_SITE | |
| | | | | 35-38; | |
| | | | | MYRISTYL 12-17; | |
| | | | | MYRISTYL | |
| | | | | 31-36; | |
| | | | | MYRISTYL 53-58; | |
| | | | | MYRISTYL | |
| | | | | 55-60; | |
| | | | | MYRISTYL 59-64; | |
| DEX0488_{—} | N | 0 - | | ASN_GLYCOSYLATION | PARP 142-356; |
| 014.aa.3 | | o1-359; | | 68-71; | PARP_reg 1-140; |
| | | | | ASN_GLYCOSYLATION | |
| | | | | 306-309; | |
| | | | | ASN_GLYCOSYLATION | |
| | | | | 325-328; | |
| | | | | PKC_PHOSPHO_SITE | |
| | | | | 42-44; | |
| | | | | PKC PHOSPHO SITE | |
| | | | | 54-56; | |
| | | | | PKC_PHOSPHO_SITE | |
| | | | | 66-68; | |
| | | | | PKC_PHOSPHO_SITE | |
| | | | | 130-132; | |
| | | | | PKC_PHOSPHO_SITE | |
| | | | | 292-294; | |
| | | | | CK2_PHOSPHO_SITE | |
| | | | | 82-85; | |
| | | | | CK2_PHOSPHO_SITE | |
| | | | | 94-97; | |
| | | | | CK2_PHOSPHO_SITE | |
| | | | | 130-133; | |
| | | | | CK2_PHOSPHO_SITE | |
| | | | | 256-259; | |
| | | | | CK2_PHOSPHO_SITE | |
| | | | | 299-302; | |
| | | | | TYR_PHOSPHO_SITE | |
| | | | | 132-139; | |
| | | | | TYR_PHOSPHO_SITE | |
| | | | | 186-193; | |
| | | | | MYRISTYL 68-73; | |
| | | | | MYRISTYL | |
| | | | | 126-131; | |
| | | | | MYRISTYL 208-213; | |
| | | | | MYRISTYL | |
| | | | | 239-244; | |
| | | | | MYRISTYL 295-300; | |
| | | | | MYRISTYL | |
| | | | | 317-322; | |
| | | | | MYRISTYL 319-324; | |
| | | | | MYRISTYL | |
| | | | | 323-328; | |
| DEX0488_{—} | N | 0 - | 20-32, 1.151; | ASN_GLYCOSYLATION | PARP 66-280; |
| 014.orf.3 | | o1-283; | 250-275, | 230-233; | |
| | | | 1.146; | ASN_GLYCOSYLATION | |
| | | | 184-196, | 249-252; | |
| | | | 1.144; | PKC_PHOSPHO_SITE | |
| | | | 34-84, 1.142; | 54-56; | |
| | | | 97-106, 1.106; | PKC_PHOSPHO_SITE | |
| | | | 233-243, | 216-218; | |
| | | | 1.104; | CK2_PHOSPHO_SITE | |
| | | | 201-210, | 6-9; | |
| | | | 1.088; | CK2_PHOSPHO_SITE | |
| | | | 139-158, | 18-21; | |
| | | | 1.079; | CK2_PHOSPHO_SITE | |
| | | | 69-75, 1.079; | 54-57; | |
| | | | 114-123, | CK2_PHOSPHO_SITE | |
| | | | 1.078; | 180-183; | |
| | | | 163-180, | CK2_PHOSPHO_SITE | |
| | | | 1.078; | 223-226; | |
| | | | 212-220, | TYR_PHOSPHO_SITE | |
| | | | 1.069; | 56-63; | |
| | | | 125-131, | TYR_PHOSPHO_SITE | |
| | | | 1.054; | 110-117; | |
| | | | 58-64, 1.04; | MYRISTYL 50-55; | |
| | | | | MYRISTYL | |
| | | | | 132-137; | |
| | | | | MYRISTYL 163-168; | |
| | | | | MYRISTYL | |
| | | | | 219-224; | |
| | | | | MYRISTYL 241-246; | |
| | | | | MYRISTYL | |
| | | | | 243-248; | |
| | | | | MYRISTYL 247-252; | |
| DEX0488_{—} | N | 0 - | 1020-1044, | ASN_GLYCOSYLATION | sp_P09874_PPOL_HUMAN |
| 014.aa.4 | | o1-1047; | 1.227; | 121-124; | 9-93; |
| | | | 469-496, 1.17; | ASN_GLYCOSYLATION | sp_P09874_PPOL_HUMAN |
| | | | 551-563, | 381-384; | 113-203; |
| | | | 1.165; | ASN_GLYCOSYLATION | POAALLERGEN 271-288; |
| | | | 1004-1015, | 517-520; | POAALLERGEN |
| | | | 1.16; | ASN_GLYCOSYLATION | 372-386; PARP 797-1000; |
| | | | 159-165, | 630-633; | BRCT 387-476; |
| | | | 1.156; | ASN_GLYCOSYLATION | zf-PARP 9-93; |
| | | | 289-314, | 961-964; | zf-PARP 113-203; |
| | | | 1.156; | ASN_GLYCOSYLATION | PARP_reg 662-795; |
| | | | 569-576, | 980-983; | BRCT 387-466; BRCT |
| | | | 1.145; | CAMP_PHOSPHO_{—} | 385-461; |
| | | | 915-927, | SITE 22-25; | PARP_ZN_FINGER_2_1 |
| | | | 1.144; | CAMP_PHOSPHO_{—} | 9-93; |
| | | | 765-779, | SITE 221-224; | PARP_ZN_FINGER_2_2 |
| | | | 1.142; | CAMP_PHOSPHO_{—} | 113-203; |
| | | | 981-999, | SITE 653-656; | PARP_ZN_FINGER_1 |
| | | | 1.129; | PKC_PHOSPHO_SITE | 21-56; |
| | | | 703-723, | 5-7; | PARP_ZN_FINGER_1 |
| | | | 1.127; | PKC_PHOSPHO_SITE | 125-162; |
| | | | 652-658, | 16-18; | |
| | | | 1.121; | PKC_PHOSPHO_SITE | |
| | | | 448-457, | 20-22; | |
| | | | 1.119; | PKC_PHOSPHO_SITE | |
| | | | 342-351, | 32-34; | |
| | | | 1.119; | PKC_PHOSPHO_SITE | |
| | | | 425-433, | 63-65; | |
| | | | 1.119; | PKC_PHOSPHO_SITE | |
| | | | 252-259, | 95-97; | |
| | | | 1.118; | PKC_PHOSPHO_SITE | |
| | | | 45-72, 1.116; | 120-122; | |
| | | | 262-283, | PKC_PHOSPHO_SITE | |
| | | | 1.111; | 124-126; | |
| | | | 18-27, 1.11; | PKC_PHOSPHO_SITE | |
| | | | 540-549, 1.11; | 140-142; | |
| | | | 828-837, | PKC_PHOSPHO_SITE | |
| | | | 1.106; 6-14, | 224-226; | |
| | | | 1.106; | PKC_PHOSPHO_SITE | |
| | | | 727-742, | 335-337; | |
| | | | 1.105; | PKC_PHOSPHO_SITE | |
| | | | 964-974, | 431-433; | |
| | | | 1.104; | PKC_PHOSPHO_SITE | |
| | | | 362-383, | 432-434; | |
| | | | 1.102; | PKC_PHOSPHO_SITE | |
| | | | 459-467, | 465-467; | |
| | | | 1.097; | PKC_PHOSPHO_SITE | |
| | | | 664-679, | 504-506; | |
| | | | 1.094; | PKC_PHOSPHO_SITE | |
| | | | 175-189, | 519-521; | |
| | | | 1.094; | PKC_PHOSPHO_SITE | |
| | | | 757-763, | 526-528; | |
| | | | 1.093; | PKC_PHOSPHO_SITE | |
| | | | 932-941, | 598-600; | |
| | | | 1.088; | PKC_PHOSPHO_SITE | |
| | | | 395-400, | 681-683; | |
| | | | 1.088; | PKC_PHOSPHO_SITE | |
| | | | 213-219, | 702-704; | |
| | | | 1.087; | PKC_PHOSPHO_SITE | |
| | | | 870-889, | 733-735; | |
| | | | 1.079; | PKC_PHOSPHO_SITE | |
| | | | 800-806, | 785-787; | |
| | | | 1.079; | PKC_PHOSPHO_SITE | |
| | | | 845-854, | 947-949; | |
| | | | 1.078; | PKC_PHOSPHO_SITE | |
| | | | 894-911, | 1004-1006; | |
| | | | 1.078; | CK2_PHOSPHO_SITE | |
| | | | 196-202, | 104-107; | |
| | | | 1.075; | CK2_PHOSPHO_SITE | |
| | | | 34-42, 1.074; | 109-112; | |
| | | | 686-692, | CK2_PHOSPHO_SITE | |
| | | | 1.073; | 224-227; | |
| | | | 634-644, | CK2_PHOSPHO_SITE | |
| | | | 1.072; | 232-235; | |
| | | | 943-951, | CK2_PHOSPHO_SITE | |
| | | | 1.069; | 257-260; | |
| | | | 530-536, | CK2_PHOSPHO_SITE | |
| | | | 1.063; | 335-338; | |
| | | | 320-325, 1.06; | CK2_PHOSPHO_SITE | |
| | | | 134-143, | 432-435; | |
| | | | 1.056; | CK2_PHOSPHO_SITE | |
| | | | 856-862, | 468-471; | |
| | | | 1.054; | CK2_PHOSPHO_SITE | |
| | | | 789-795, 1.04; | 537-540; | |
| | | | 500-505, | CK2_PHOSPHO_SITE | |
| | | | 1.037; | 606-609; | |
| | | | | CK2_PHOSPHO_SITE | |
| | | | | 785-788; | |
| | | | | CK2_PHOSPHO_SITE | |
| | | | | 911-914; | |
| | | | | CK2_PHOSPHO_SITE | |
| | | | | 954-957; | |
| | | | | TYR_PHOSPHO_SITE | |
| | | | | 337-344; | |
| | | | | TYR_PHOSPHO_SITE | |
| | | | | 787-794; | |
| | | | | TYR_PHOSPHO_SITE | |
| | | | | 841-848; | |
| | | | | MYRISTYL 92-97; | |
| | | | | MYRISTYL | |
| | | | | 286-291; | |
| | | | | MYRISTYL 416-421; | |
| | | | | MYRISTYL | |
| | | | | 500-505; | |
| | | | | MYRISTYL 515-520; | |
| | | | | MYRISTYL | |
| | | | | 538-543; | |
| | | | | MYRISTYL 593-598; | |
| | | | | MYRISTYL | |
| | | | | 723-728; | |
| | | | | MYRISTYL 781-786; | |
| | | | | MYRISTYL | |
| | | | | 863-868; | |
| | | | | MYRISTYL 894-899; | |
| | | | | MYRISTYL | |
| | | | | 950-955; | |
| | | | | MYRISTYL 972-977; | |
| | | | | MYRISTYL | |
| | | | | 974-979; | |
| | | | | MYRISTYL 978-983; | |
| | | | | MYRISTYL | |
| | | | | 1000-1005; | |
| | | | | AMIDATION | |
| | | | | 205-208; | |
| DEX0488_{—} | N | 0 - | 119-140, | ASN_GLYCOSYLATION | |
| 015.aa.1 | | o1-158; | 1.172; 4-20, | 116-119; | |
| | | | 1.144; 29-39, | CAMP_PHOSPHO_{—} | |
| | | | 1.125; 94-100, | SITE 51-54; | |
| | | | 1.079; | PKC_PHOSPHO_SITE | |
| | | | 54-63, 1.059; | 40-42; | |
| | | | 80-86, 1.054; | PKC_PHOSPHO_SITE | |
| | | | 69-75, 1.052; | 50-52; | |
| | | | | PKC_PHOSPHO_SITE | |
| | | | | 76-78; | |
| | | | | CK2_PHOSPHO_SITE | |
| | | | | 153-156; | |
| | | | | MYRISTYL 16-21; | |
| | | | | MYRISTYL | |
| | | | | 39-44; | |
| | | | | MYRISTYL 44-49; | |
| | | | | MYRISTYL | |
| | | | | 49-54; | |
| | | | | MYRISTYL 62-67; | |
| | | | | MYRISTYL | |
| | | | | 66-71; | |
| | | | | MYRISTYL 71-76; | |
| | | | | MYRISTYL | |
| | | | | 90-95; | |
| | | | | MYRISTYL 144-149; | |
| | | | | AMIDATION 24-27; | |
| DEX0488_{—} | N | 7 - | 61-129, 1.233; | ASN_GLYCOSYLATION | GPCRRHODOPSN 60-81; |
| 015.orf.1 | | o1-26; | 226-227, | 1-4; | GPCRRHODOPSN |
| | | tm27-49; | 1.226; | ASN_GLYCOSYLATION | 242-266; |
| | | i50-61; | 134-173, | 5-8; | G_PROTEIN_RECEP_F1_{—} |
| | | tm62-84; | 1.215; | ASN_GLYCOSYLATION | 2 39-297; |
| | | o85-98; | 26-48, 1.199; | 13-16; | |
| | | tm99-121; | 283-331, | ASN_GLYCOSYLATION | |
| | | i122-141; | 1.187; | 77-80; | |
| | | tm142-161; | 175-219, | ASN_GLYCOSYLATION | |
| | | o162-180; | 1.182; | 128-131; | |
| | | | 11-20, 1.137; | ASN_GLYCOSYLATION | |
| | | | | 223-226; | |
| | | | | CAMP_PHOSPHO_{—} | |
| | | | | SITE 52-55; | |
| | | | | PKC_PHOSPHO_SITE | |
| | | | | 91-93; | |
| | | | | PKC_PHOSPHO_SITE | |
| | | | | 132-134; | |
| | | tm181-203; | | PKC_PHOSPHO_SITE | |
| | | i204-244; | | 136-138; | |
| | | tm245-267; | | PKC_PHOSPHO_SITE | |
| | | o268-281; | | 168-170; | |
| | | tm282-299; | | PKC_PHOSPHO_SITE | |
| | | i300-343; | | 238-240; | |
| | | | | PKC_PHOSPHO_SITE | |
| | | | | 241-243; | |
| | | | | CK2_PHOSPHO_SITE | |
| | | | | 204-207; | |
| DEX0488_{—} | N | 7 - | 61-129, 1.233; | ASN_GLYCOSYLATION | GPCRRHODOPSN 60-81; |
| 015.orf.2 | | o1-26; | 226-277, | 1-4; | GPCRRHODOPSN |
| | | tm27-49; | 1.226; | ASN_GLYCOSYLATION | 242-266; |
| | | i50-61; | 134-173, | 5-8; | G_PROTEIN_RECEP_F1_{—} |
| | | tm62-84; | 1.215; | ASN_GLYCOSYLATION | 239-297; |
| | | o85-98; | 26-48, 1.199; | 13-16; | |
| | | tm99-121; | 283-331, | ASN_GLYCOSYLATION | |
| | | i122-141; | 1.187; | 77-80; | |
| | | tm142-161; | 175-219, | ASN_GLYCOSYLATION | |
| | | o162-180; | 1.182; | 128-131; | |
| | | tm181-203; | 11-20, 1.137; | ASN_GLYCOSYLATION | |
| | | i204-244; | | 223-226; | |
| | | tm245-267; | | CAMP_PHOSPHO_{—} | |
| | | o268-281; | | SITE 52-55; | |
| | | tm282-299; | | PKC_PHOSPHO_SITE | |
| | | i300-343; | | 91-93; | |
| | | | | PKC_PHOSPHO_SITE | |
| | | | | 132-134; | |
| | | | | PKC_PHOSPHO_SITE | |
| | | | | 136-138; | |
| | | | | PKC_PHOSPHO_SITE | |
| | | | | 168-170; | |
| | | | | PKC_PHOSPHO_SITE | |
| | | | | 238-240; | |
| | | | | PKC_PHOSPHO_SITE | |
| | | | | 241-243; | |
| | | | | CK2_PHOSPHO_SITE | |
| | | | | 204-207; | |
| DEX0488_{—} | N | 0 - | 107-137, 1.206; | ASN_GLYCOSYLATION | |
| 016.aa.1 | | o1-223; | 86-95, 1.186; | 9-12; | |
| | | | 28-63, 1.164; | CAMP_PHOSPHO_{—} | |
| | | | 65-78, 1.132; | SITE 79-82; | |
| | | | 16-25, 1.088; | CAMP_PHOSPHO_{—} | |
| | | | 183-196, | SITE 96-99; | |
| | | | 1.088; | PKC_PHOSPHO_SITE | |
| | | | 142-147, | 8-10; | |
| | | | 1.036; | PKC_PHOSPHO_SITE | |
| | | | | 15-17; | |
| | | | | PKC_PHOSPHO_SITE | |
| | | | | 51-53; | |
| | | | | PKC_PHOSPHO_SITE | |
| | | | | 99-101; | |
| | | | | CK2_PHOSPHO SITE | |
| | | | | 54-57; | |
| | | | | CK2_PHOSPHO_SITE | |
| | | | | 136-139; | |
| | | | | CK2_PHOSPHO_SITE | |
| | | | | 147-150; | |
| | | | | MYRISTYL 35-40; | |
| | | | | MYRISTYL | |
| | | | | 37-42; | |
| | | | | MYRISTYL 178-183; | |
| | | | | MYRISTYL | |
| | | | | 182-187; | |
| | | | | MYRISTYL 198-203; | |
| | | | | MYRISTYL | |
| | | | | 202-207; | |
| | | | | MYRISTYL 206-211; | |
| | | | | AMIDATION | |
| | | | | 156-159; | |
| DEX0488_{—} | N | 0 - | 224-254, | ASN_GLYCOSYLATION | |
| 016.aa.3 | | o1-340; | 1.206; | 126-129; | |
| | | | 203-212, | CAMP_PHOSPHO_{—} | |
| | | | 1.186; | SITE 13-16; | |
| | | | 145-180, | CAMP_PHOSPHO_{—} | |
| | | | 1.164; | SITE 196-199; | |
| | | | 62-69, 1.132; | CAMP_PHOSPHO_{—} | |
| | | | 182-195, | SITE 213-216; | |
| | | | 1.132; | PKC_PHOSPHO_SITE | |
| | | | 71-84, 1.129; | 7-9; | |
| | | | 33-48, 1.095; | PKC_PHOSPHO_SITE | |
| | | | 133-142, | 11-13; | |
| | | | 1.088; | PKC_PHOSPHO_SITE | |
| | | | 300-313, | 60-62; | |
| | | | 1.088; | PKC_PHOSPHO_SITE | |
| | | | 19-25, 1.058; | 80-82; | |
| | | | 106-112, | PKC_PHOSPHO_SITE | |
| | | | 1.057; | 125-127; | |
| | | | 259-264, | PKC_PHOSPHO_SITE | |
| | | | 1.036; | 132-134; | |
| | | | | PKC_PHOSPHO_SITE | |
| | | | | 168-170; | |
| | | | | PKC_PHOSPHO_SITE | |
| | | | | 216-218; | |
| | | | | CK2_PHOSPHO_SITE | |
| | | | | 108-111; | |
| | | | | CK2_PHOSPHO_SITE | |
| | | | | 116-119; | |
| | | | | CK2_PHOSPHO_SITE | |
| | | | | 171-174; | |
| | | | | CK2_PHOSPHO_SITE | |
| | | | | 253-256; | |
| | | | | CK2_PHOSPHO_SITE | |
| | | | | 264-267; | |
| | | | | MYRISTYL 91-96; | |
| | | | | MYRISTYL | |
| | | | | 92-97; | |
| | | | | MYRISTYL 106-111; | |
| | | | | MYRISTYL | |
| | | | | 152-157; | |
| | | | | MYRISTYL 154-159; | |
| | | | | MYRISTYL | |
| | | | | 295-300; | |
| | | | | MYRISTYL 299-304; | |
| | | | | MYRISTYL | |
| | | | | 315-320; | |
| | | | | MYRISTYL 319-324; | |
| | | | | MYRISTYL | |
| | | | | 323-328; | |
| | | | | AMIDATION | |
| | | | | 273-276; | |
| DEX0488_{—} | N | 0 - | 198-228, | ASN_GLYCOSYLATION | |
| 016.orf.3 | | o1-314; | 1.206; | 100-103; | |
| | | | 177-186, | CAMP_PHOSPHO_{—} | |
| | | | 1.186; | SITE 170-173; | |
| | | | 119-154, | CAMP_PHOSPHO_{—} | |
| | | | 1.164; | SITE 187-190; | |
| | | | 36-43, 1.132; | PKC_PHOSPHO_SITE | |
| | | | 156-169, | 34-36; | |
| | | | 1.132; | PKC_PHOSPHO_SITE | |
| | | | 45-58, 1.129; | 54-56; | |
| | | | 7-22, 1.095; | PKC_PHOSPHO_SITE | |
| | | | 107-116, | 99-101; | |
| | | | 1.088; | PKC_PHOSPHO_SITE | |
| | | | 274-287, | 106-108; | |
| | | | 1.088; | PKC_PHOSPHO_SITE | |
| | | | 80-86, 1.057; | 142-144; | |
| | | | 233-238, | PKC_PHOSPHO_SITE | |
| | | | 1.036; | 190-192; | |
| | | | | CK2_PHOSPHO_SITE | |
| | | | | 82-85; | |
| | | | | CK2_PHOSPHO_SITE | |
| | | | | 90-93; | |
| | | | | CK2_PHOSPHO_SITE | |
| | | | | 145-148; | |
| | | | | CK2_PHOSPHO_SITE | |
| | | | | 227-230; | |
| | | | | CK2_PHOSPHO_SITE | |
| | | | | 238-241; | |
| | | | | MYRISTYL 65-70; | |
| | | | | MYRISTYL | |
| | | | | 66-71; | |
| | | | | MYRISTYL 80-85; | |
| | | | | MYRISTYL | |
| | | | | 126-131; | |
| | | | | MYRISTYL 128-133; | |
| | | | | MYRISTYL | |
| | | | | 269-274; | |
| | | | | MYRISTYL 273-278; | |
| | | | | MYRISTYL | |
| | | | | 289-294; | |
| | | | | MYRISTYL 293-298; | |
| | | | | MYRISTYL | |
| | | | | 297-302; | |
| | | | | AMIDATION | |
| | | | | 247-250; | |
| DEX0488_{—} | N | 0 - | 319-346, | ASN_GLYCOSYLATION | |
| 016.aa.8 | | o1-349; | 1.209; | 9-12; | |
| | | | 107-137, | CAMP_PHOSPHO_{—} | |
| | | | 1.206; | SITE 79-82; | |
| | | | 86-95, 1.186; | CAMP_PHOSPHO_{—} | |
| | | | 184-205, | SITE 96-99; | |
| | | | 1.176; | PKC_PHOSPHO_SITE | |
| | | | 240-265, | 8-10; | |
| | | | 1.173; | PKC_PHOSPHO_SITE | |
| | | | 28-63, 1.164; | 15-17; | |
| | | | 226-237, | PKC_PHOSPHO_SITE | |
| | | | 1.159; | 51-53; | |
| | | | 276-310, | PKC_PHOSPHO_SITE | |
| | | | 1.156; | 99-101; | |
| | | | 65-78, 1.132; | PKC_PHOSPHO_SITE | |
| | | | 216-223, | 237-239; | |
| | | | 1.101; | PKC_PHOSPHO_SITE | |
| | | | 16-25, 1.088; | 346-348; | |
| | | | 172-178, 1.04; | CK2_PHOSPHO_SITE | |
| | | | 142-147, | 54-57; | |
| | | | 1.036; | CK2_PHOSPHO_SITE | |
| | | | | 136-139; | |
| | | | | CK2_PHOSPHO_SITE | |
| | | | | 147-150; | |
| | | | | CK2_PHOSPHO_SITE | |
| | | | | 237-240; | |
| | | | | CK2_PHOSPHO_SITE | |
| | | | | 287-290; | |
| | | | | MYRISTYL 35-40; | |
| | | | | MYRISTYL | |
| | | | | 37-42; | |
| | | | | MYRISTYL 233-238; | |
| | | | | AMIDATION | |
| | | | | 156-159; | |
| DEX0488_{—} | N | 0 - | 45-68, 1.145; | PKC_PHOSPHO_SITE | |
| 017.aa.1 | | o1-89; | 9-24, 1.137; | 79-81; | |
| | | | 80-86, 1.097; | TYR_PHOSPHO_SITE | |
| | | | 36-42, 1.078; | 69-75; | |
| | | | | MYRISTYL 27-32; | |
| DEX0488_{—} | Y | 0 - | 23-36, 1.161; | PKC_PHOSPHO_SITE | |
| 017.orf.1 | | i1-47; | 15-21, 1.072; | 1-3; | |
| | | | | PKC_PHOSPHO_SITE | |
| | | | | 11-13; | |
| | | | | MYRISTYL 6-11; | |
| | | | | MYRISTYL | |
| | | | | 37-42; | |
| | | | | MYRISTYL 38-43; | |
| DEX0488_{—} | N | 0 - | 34-94, 1.219; | PKC_PHOSPHO_SITE | |
| 018.aa.1 | | o1-112; | 96-107, 1.204; | 2-4; | |
| | | | 7-14, 1.055; | PKC_PHOSPHO_SITE | |
| | | | | 24-26; | |
| | | | | PKC_PHOSPHO_SITE | |
| | | | | 93-95; | |
| | | | | MYRISTYL 16-21; | |
| | | | | MYRISTYL | |
| | | | | 20-25; | |
| DEX0488_{—} | N | 0 - | 8-19, 1.232; | PKC_PHOSPHO_SITE | |
| 018.orf.1 | | o1-146; | 135-143, | 17-19; | |
| | | | 1.214; | PKC_PHOSPHO_SITE | |
| | | | 27-59, 1.189; | 44-46; | |
| | | | 113-132, | PKC_PHOSPHO_SITE | |
| | | | 1.179; | 120-122; | |
| | | | 61-77, 1.179; | PKC_PHOSPHO_SITE | |
| | | | 85-100, 1.093; | 135-137; | |
| | | | 104-110, | MYRISTYL 6-11; | |
| | | | 1.045; | MYRISTYL | |
| | | | | 25-30; | |
| | | | | MYRISTYL 63-68; | |
| | | | | MYRISTYL | |
| | | | | 90-95; | |
| | | | | MYRISTYL 106-111; | |
| | | | | MYRISTYL | |
| | | | | 109-114; | |
| DEX0488_{—} | N | 0 - | 426-470, 1.22; | CAMP_PHOSPHO_{—} | sp_Q99640_Q99640_HUMAN |
| 018.aa.2 | | o1-507; | 393-406, | SITE 80-83; | 110-395; |
| | | | 1.216; | PKC_PHOSPHO_SITE | TYRKINASE 223-241; |
| | | | 155-174, | 40-42; | TYRKINASE 287-309; |
| | | | 1.214; | PKC_PHOSPHO_SITE | pkinase 110-403; |
| | | | 215-242, | 83-85; | S_TKc 110-403; |
| | | | 1.176; | PKC_PHOSPHO_SITE | TyrKc 110-403; |
| | | | 286-304, | 499-501; | PRO_RICH 5-72; |
| | | | 1.146; | PKC_PHOSPHO_SITE | PROTEIN_KINASE_DOM |
| | | | 373-384, | 505-507; | 110-403; |
| | | | 1.143; | CK2_PHOSPHO_SITE | PROTEIN_KINASE_ATP |
| | | | 18-34, 1.14; | 100-103; | 116-139; |
| | | | 246-259, | CK2_PHOSPHO_SITE | PROTEIN_KINASE_ST |
| | | | 1.136; | 120-123; | 229-241; |
| | | | 481-494, | CK2_PHOSPHO_SITE | |
| | | | 1.132; | 129-132; | |
| | | | 348-367, | CK2_PHOSPHO_SITE | |
| | | | 1.127; | 204-207; | |
| | | | 408-419, | CK2_PHOSPHO_SITE | |
| | | | 1.127; | 285-288; | |
| | | | 181-213, | CK2_PHOSPHO_SITE | |
| | | | 1.125; | 295-298; | |
| | | | 121-128, | CK2_PHOSPHO_SITE | |
| | | | 1.096; | 325-328; | |
| | | | 135-141, | CK2_PHOSPHO_SITE | |
| | | | 1.096; | 340-343; | |
| | | | 48-69, 1.091; | CK2_PHOSPHO_SITE | |
| | | | 316-323, 1.07; | 473-476; | |
| | | | 74-82, 1.068; | TYR_PHOSPHO_SITE | |
| | | | 275-282, | 128-136; | |
| | | | 1.067; 5-11, | MYRISTYL 46-51; | |
| | | | 1.059; | MYRISTYL | |
| | | | 105-119, | 165-170; | |
| | | | 1.052; | MYRISTYL 259-264; | |
| | | | 327-333, | MYRISTYL | |
| | | | 1.048; | 281-286; | |
| | | | 37-42, 1.029; | MYRISTYL 333-338; | |
| | | | | MYRISTYL | |
| | | | | 334-339; | |
| | | | | MYRISTYL 335-340; | |
| | | | | MYRISTYL | |
| | | | | 410-415; | |
| | | | | MYRISTYL 459-464; | |
| DEX0488_{—} | N | 0 - | 162-181, | CAMP_PHOSPHO_{—} | sp_Q99640_Q99640_HUMAN |
| 018.orf.2 | | o1-335; | 1.214; | SITE 87-90; | 117-334; |
| | | | 222-249, | PKC_PHOSPHO_SITE | TYRKINASE 230-248; |
| | | | 1.176; | 47-49; | TYRKINASE 294-316; |
| | | | 293-311, | PKC_PHOSPHO_SITE | pkinase 117-334; |
| | | | 1.146; | 90-92; | S_TKc 117-335; |
| | | | 25-41, 1.14; | CK2_PHOSPHO_SITE | TyrKc 117-332; |
| | | | 253-266, | 107-110; | PRO_RICH 12-79; |
| | | | 1.136; | CK2_PHOSPHO_SITE | PROTEIN_KINASE_DOM |
| | | | 188-220, | 127-130; | 117-335; |
| | | | 1.125; | CK2_PHOSPHO_SITE | PROTEIN_KINASE_ATP |
| | | | 142-148, | 136-139; | 123-146; |
| | | | 1.096; | CK2_PHOSPHO_SITE | PROTEIN_KINASE_ST |
| | | | 128-135, | 211-214; | 236-248; |
| | | | 1.096; | CK2_PHOSPHO_SITE | |
| | | | 55-76, 1.091; | 292-295; | |
| | | | 4-10, 1.08; | CK2_PHOSPHO_SITE | |
| | | | 323-330, 1.07; | 302-305; | |
| | | | 81-89, 1.068; | CK2_PHOSPHO_SITE | |
| | | | 282-289, | 332-335; | |
| | | | 1.067; | TYR_PHOSPHO_SITE | |
| | | | 12-18, 1.059; | 135-143; | |
| | | | 112-126, | MYRISTYL 53-58; | |
| | | | 1.052; | MYRISTYL | |
| | | | 44-49, 1.029; | 172-177; | |
| | | | | MYRISTYL 266-271; | |
| | | | | MYRISTYL | |
| | | | | 288-293; | |
| DEX0488_{—} | N | 0 - | 8-19, 1.232; | PKC_PHOSPHO_SITE | |
| 018.orf.3 | | o1-146; | 135-143, | 17-19; | |
| | | | 1.214; | PKC_PHOSPHO_SITE | |
| | | | 27-59, 1.189; | 44-46; | |
| | | | 113-132, | PKC_PHOSPHO_SITE | |
| | | | 1.179; | 120-122; | |
| | | | 61-77, 1.179; | PKC_PHOSPHO_SITE | |
| | | | 85-100, 1.093; | 135-137; | |
| | | | 104-110, | MYRISTYL 6-11; | |
| | | | 1.045; | MYRISTYL | |
| | | | | 25-30; | |
| | | | | MYRISTYL 63-68; | |
| | | | | MYRISTYL | |
| | | | | 90-95; | |
| | | | | MYRISTYL 106-111; | |
| | | | | MYRISTYL | |
| | | | | 109-114; | |
| DEX0488_{—} | N | 0 - | 426-470, 1.22; | CAMP_PHOSPHO_{—} | Armadillo_seg 350-390; |
| 018.aa.4 | | o1-513; | 393-406, | SITE 80-83; | Armadillo_seg |
| | | | 1.216; | PKC_PHOSPHO_SITE | 392-432; |
| | | | 155-174, | 40-42; | Armadillo_seg 660-702; |
| | | | 1.214; | PKC_PHOSPHO_SITE | ARM 350-390; |
| | | | 215-242, | 83-85; | ARM 392-432; ARM |
| | | | 1.176; | PKC_PHOSPHO_SITE | 554-601; |
| | | | 286-304, | 499-501; | ARM_REPEAT 361-404; |
| | | | 1.146; | PKC_PHOSPHO_SITE | |
| | | | 373-384, | 505-507; | |
| | | | 1.143; | CK2_PHOSPHO_SITE | |
| | | | 18-34, 1.14; | 100-103; | |
| | | | 246-259, | CK2_PHOSPHO_SITE | |
| | | | 1.136; | 120-123; | |
| | | | 481-494, | CK2_PHOSPHO_SITE | |
| | | | 1.132; | 129-132; | |
| | | | 348-367, | CK2_PHOSPHO_SITE | |
| | | | 1.127; | 204-207; | |
| | | | 408-419, | CK2_PHOSPHO_SITE | |
| | | | 1.127; | 285-288; | |
| | | | 181-213, | CK2_PHOSPHO_SITE | |
| | | | 1.125; | 295-298; | |
| | | | 121-128, | CK2_PHOSPHO_SITE | |
| | | | 1.096; | 325-328; | |
| | | | 135-141, | CK2_PHOSPHO_SITE | |
| | | | 1.096; | 340-343; | |
| | | | 48-69, 1.091; | CK2_PHOSPHO_SITE | |
| | | | 501-510, | 473-476; | |
| | | | 1.087; | TYR_PHOSPHO_SITE | |
| | | | 316-323, 1.07; | 128-136; | |
| | | | 74-82, 1.068; | MYRISTYL 46-51; | |
| | | | 275-282, | MYRISTYL | |
| | | | 1.067; 5-11, | 165-170; | |
| | | | 1.059; | MYRISTYL 259-264; | |
| | | | 105-119, | MYRISTYL | |
| | | | 1.052; | 281-286; | |
| | | | 327-333, | MYRISTYL 333-338; | |
| | | | 1.048; | MYRISTYL | |
| | | | 37-42, 1.029; | 334-339; | |
| | | | | MYRISTYL 335-340; | |
| | | | | MYRISTYL | |
| | | | | 410-415; | |
| | | | | MYRISTYL 459-464; | |
| DEX0488_{—} | N | 0 - | 162-181, | CAMP_PHOSPHO_{—} | sp_Q99640_Q99640_HUMAN |
| 018.orf.4 | | o1-335; | 1.214; | SITE 87-90; | 117-334; |
| | | | 222-249, | PKC_PHOSPHO_SITE | TYRKINASE 230-248; |
| | | | 1.176; | 47-49; | TYRKINASE 294-316; |
| | | | 293-311, | PKC_PHOSPHO_SITE | pkinase 117-334; |
| | | | 1.146; | 90-92; | S_TKc 117-335; |
| | | | 25-41, 1.14; | CK2_PHOSPHO_SITE | TyrKc 117-332; |
| | | | 253-266, | 107-110; | PRO_RICH 12-79; |
| | | | 1.136; | CK2_PHOSPHO_SITE | PROTEIN_KINASE_DOM |
| | | | 188-220, | 127-130; | 117-335; |
| | | | 1.125; | CK2_PHOSPHO_SITE | PROTEIN_KINASE_ATP |
| | | | 142-148, | 136-139; | 123-146; |
| | | | 1.096; | CK2_PHOSPHO_SITE | PROTEIN_KINASE_ST |
| | | | 128-135, | 211-214; | 236-248; |
| | | | 1.096; | CK2_PHOSPHO_SITE | |
| | | | 55-76, 1.091; | 292-295; | |
| | | | 4-10, 1.08; | CK2_PHOSPHO_SITE | |
| | | | 323-330, 1.07; | 302-305; | |
| | | | 81-89, 1.068; | CK2_PHOSPHO_SITE | |
| | | | 282-289, | 332-335; | |
| | | | 1.067; | TYR_PHOSPHO_SITE | |
| | | | 12-18, 1.059; | 135-143; | |
| | | | 112-126, | MYRISTYL 53-58; | |
| | | | 1.052; | MYRISTYL | |
| | | | 44-49, 1.029; | 172-177; | |
| | | | | MYRISTYL 266-271; | |
| | | | | MYRISTYL | |
| | | | | 288-293; | |
| DEX0488_{—} | N | 0 - | 8-19, 1.232; | PKC_PHOSPHO_SITE | |
| 018.orf.5 | | o1-146; | 135-143, | 17-19; | |
| | | | 1.214; | PKC PHOSPHO SITE | |
| | | | 27-59, 1.189; | 44-46; | |
| | | | 113-132, | PKC_PHOSPHO_SITE | |
| | | | 1.179; | 120-122; | |
| | | | 61-77, 1.179; | PKC_PHOSPHO_SITE | |
| | | | 85-100, 1.093; | 135-137; | |
| | | | 104-110, | MYRISTYL 6-11; | |
| | | | 1.045; | MYRISTYL | |
| | | | | 25-30; | |
| | | | | MYRISTYL 63-68; | |
| | | | | MYRISTYL | |
| | | | | 90-95; | |
| | | | | MYRISTYL 106-111; | |
| | | | | MYRISTYL | |
| | | | | 109-114; | |
| DEX0488_{—} | N | 0 - | 8-19, 1.232, | PKC_PHOSPHO_SITE | |
| 018.orf.6 | | o1-146; | 135-143, | 17-19; | |
| | | | 1.214; | PKC_PHOSPHO_SITE | |
| | | | 27-59, 1.189; | 44-46; | |
| | | | 113-132, | PKC_PHOSPHO_SITE | |
| | | | 1.179; | 120-122; | |
| | | | 61-77, 1.179; | PKC_PHOSPHO_SITE | |
| | | | 85-100, 1.093; | 135-137; | |
| | | | 104-110, | MYRISTYL 6-11; | |
| | | | 1.045; | MYRISTYL | |
| | | | | 25-30; | |
| | | | | MYRISTYL 63-68; | |
| | | | | MYRISTYL | |
| | | | | 90-95; | |
| | | | | MYRISTYL 106-111; | |
| | | | | MYRISTYL | |
| | | | | 109-114; | |
| DEX0488_{—} | N | 0 - | 8-19, 1.232; | PKC_PHOSPHO_SITE | |
| 018.orf.7 | | o1-146; | 135-143, | 17-19; | |
| | | | 1.214; | PKC_PHOSPHO_SITE | |
| | | | 27-59, 1.189; | 44-46; | |
| | | | 113-132, | PKC_PHOSPHO_SITE | |
| | | | 1.179; | 120-122; | |
| | | | 61-77, 1.179; | PKC_PHOSPHO_SITE | |
| | | | 85-100, 1.093; | 135-137; | |
| | | | 104-110, | MYRISTYL 6-11; | |
| | | | 1.045; | MYRISTYL | |
| | | | | 25-30; | |
| | | | | MYRISTYL 63-68; | |
| | | | | MYRISTYL | |
| | | | | 90-95; | |
| | | | | MYRISTYL 106-111; | |
| | | | | MYRISTYL | |
| | | | | 109-114; | |
| DEX0488_{—} | N | 0 - | 187-231, 1.22; | PKC_PHOSPHO_SITE | sp_Q99640_Q99640_HUMAN |
| 018.aa.8 | | o1-274; | 154-167, | 70-72; | 78-156; |
| | | | 1.216; | PKC_PHOSPHO_SITE | |
| | | | 29-58, 1.167; | 71-73; | |
| | | | 77-109, 1.146; | PKC_PHOSPHO_SITE | |
| | | | 134-145, | 260-262; | |
| | | | 1.143; | PKC_PHOSPHO_SITE | |
| | | | 242-255, | 266-268; | |
| | | | 1.132; | CK2_PHOSPHO_SITE | |
| | | | 20-27, 1.13; | 58-61; | |
| | | | 169-180, | CK2 PHOSPHO SITE | |
| | | | 1.127; 4-14, | 60-63; | |
| | | | 1.102; | CK2_PHOSPHO_SITE | |
| | | | 262-271, | 100-103; | |
| | | | 1.087; | CK2_PHOSPHO_SITE | |
| | | | 121-128, 1.07; | 234-237; | |
| | | | 65-70, 1.054; | MYRISTYL 9-14; | |
| | | | | MYRISTYL | |
| | | | | 25-30; | |
| | | | | MYRISTYL 171-176; | |
| | | | | MYRISTYL | |
| | | | | 220-225; | |
| DEX0488_{—} | N | 0 - | 128-172, 1.22; | PKC_PHOSPHO_SITE | sp_Q99640_Q99640_HUMAN |
| 018.orf.8 | | o1-215; | 95-108, 1.216; | 201-203; | 37-97; |
| | | | 27-50, 1.169; | PKC_PHOSPHO_SITE | PRICHEXTENSN 4-16; |
| | | | 75-86, 1.143; | 207-209; | PRICHEXTENSN 19-35; |
| | | | 183-196, | CK2_PHOSPHO_SITE | PRICHEXTENSN |
| | | | 1.132; | 41-44; | 151-168; |
| | | | 110-121, | CK2_PHOSPHO_SITE | |
| | | | 1.127; | 175-178; | |
| | | | 17-24, 1.113; | MYRISTYL 112-117; | |
| | | | 4-13, 1.089; | MYRISTYL | |
| | | | 203-212, | 161-166; | |
| | | | 1.087; | | |
| | | | 62-69, 1.07; | | |
| DEX0488_{—} | N | 0 - | 660-671, | ASN_GLYCOSYLATION | sp_Q07832_PLK1_MOUSE |
| 019.aa.1 | | o1-711; | 1.253; | 385-388; | 59-305; |
| | | | 125-136, | ASN_GLYCOSYLATION | TYRKINASE 166-184; |
| | | | 1.231; | 437-440; | TYRKINASE 232-254; |
| | | | 360-387, | ASN_GLYCOSYLATION | POLO_box 417-480; |
| | | | 1.202; | 527-530; | pkinase 53-305; |
| | | | 153-177, | CAMP_PHOSPHO_{—} | S_TKc 53-305; |
| | | | 1.192; | SITE 134-137; | TyrKc 53-304; |
| | | | 104-117, | CAMP_PHOSPHO_{—} | POLO_BOX_1 417-480; |
| | | | 1.186; | SITE 207-210; | POLO_BOX_2 |
| | | | 677-708, | CAMP_PHOSPHO_{—} | 515-534; |
| | | | 1.182; | SITE 474-477; | PROTEIN_KINASE_DOM |
| | | | 402-418 | PKC_PHOSPHO_SITE | 53-305; |
| | | | 1.164; | 49-51; | PROTEIN_KINASE_ATP |
| | | | 76-93, 1.163; | PKC_PHOSPHO_SITE | 59-82; |
| | | | 632-654, | 224-226; | PROTEIN_KINASE_ST |
| | | | 1.156; | PKC_PHOSPHO_SITE | 172-184; |
| | | | 270-285, | 291-293; | |
| | | | 1.141; | PKC_PHOSPHO_SITE | |
| | | | 571-578, | 335-337; | |
| | | | 1.141; | PKC_PHOSPHO_SITE | |
| | | | 519-529, | 390-392; | |
| | | | 1.141; | PKC_PHOSPHO_SITE | |
| | | | 229-249, | 418-420; | |
| | | | 1.137; | PKC_PHOSPHO_SITE | |
| | | | 40-47, 1.136; | 439-441; | |
| | | | 307-332, | PKC_PHOSPHO_SITE | |
| | | | 1.135; | 498-500; | |
| | | | 209-226, | PKC_PHOSPHO_SITE | |
| | | | 1.132; | 538-540; | |
| | | | 505-513, 1.13; | CK2_PHOSPHO_SITE | |
| | | | 19-38, 1.128; | 71-74; | |
| | | | 422-437, | CK2_PHOSPHO_SITE | |
| | | | 1.119; | 137-140; | |
| | | | 462-470, | CK2 PHOSPHO SITE | |
| | | | 1.119; | 149-152; | |
| | | | 556-566, | CK2_PHOSPHO_SITE | |
| | | | 1.114; | 199-202; | |
| | | | 252-263, | CK2_PHOSPHO_SITE | |
| | | | 1.109; | 295-298; | |
| | | | 474-482, | CK2_PHOSPHO_SITE | |
| | | | 1.106; | 330-333; | |
| | | | 601-608, | CK2_PHOSPHO_SITE | |
| | | | 1.101; | 498-501; | |
| | | | 339-345, | MYRISTYL 29-34; | |
| | | | 1.094; | MYRISTYL | |
| | | | 64-70, 1.084; | 433-438; | |
| | | | 610-617, | MYRISTYL 543-548; | |
| | | | 1.083; | MYRISTYL | |
| | | | 590-597, | 555-560; | |
| | | | 1.082; | MYRISTYL 569-574; | |
| | | | 488-494, | MYRISTYL | |
| | | | 1.077; | 619-624; | |
| | | | 531-540, | MYRISTYL 628-633; | |
| | | | 1.075; | MYRISTYL | |
| | | | 623-603, | 634-639; | |
| | | | 1.058; | MYRISTYL 643-648; | |
| | | | 392-397, | MYRISTYL | |
| | | | 1.044; | 654-659; | |
| | | | 189-195, | | |
| | | | 1.044; | | |
| DEX0488_{—} | N | 0 - | 162-173, | ASN_GLYCOSYLATION | sp_Q07832_PLK1_MOUSE |
| 019.orf.1 | | o1-601; | 1.231; | 422-425; | 96-342; |
| | | | 397-424, | ASN_GLYCOSYLATION | TYRKINASE 203-221; |
| | | | 1.202; | 474-477; | TYRKINASE 269-291; |
| | | | 190-214, | ASN_GLYCOSYLATION | POLO_box 454-517; |
| | | | 1.192; | 564-567; | pkinase 90-342; |
| | | | 141-154, | CAMP_PHOSPHO_{—} | S_TKc 90-342; |
| | | | 1.186; | SITE 171-174; | TyrKc 90-341; |
| | | | 439-455, | CAMP_PHOSPHO_{—} | POLO_BOX_1 454-517; |
| | | | 1.164; | SITE 244-247; | POLO_BOX_2 |
| | | | 113-130, | CAMP_PHOSPHO_{—} | 552-571; |
| | | | 1.163; | SITE 511-514; | PROTEIN_KINASE_DOM |
| | | | 307-322, | PKC_PHOSPHO_SITE | 90-342; |
| | | | 1.141; | 16-18; | PROTEIN_KINASE_ATP |
| | | | 556-566, | PKC_PHOSPHO_SITE | 96-119; |
| | | | 1.141; | 27-29; | PROTEIN_KINASE_ST |
| | | | 266-286, | PKC_PHOSPHO_SITE | 209-221; |
| | | | 1.137; | 86-88; | |
| | | | 77-84, 1.136; | PKC_PHOSPHO_SITE | |
| | | | 344-369, | 261-263; | |
| | | | 1.135; | PKC_PHOSPHO_SITE | |
| | | | 246-263, | 328-330; | |
| | | | 1.132; | PKC_PHOSPHO_SITE | |
| | | | 542-550, 1.13; | 372-374; | |
| | | | 56-75, 1.128; | PKC_PHOSPHO_SITE | |
| | | | 22-29, 1.124; | 427-429; | |
| | | | 459-474, | PKC_PHOSPHO_SITE | |
| | | | 1.119; | 455-457; | |
| | | | 499-507, | PKC_PHOSPHO_SITE | |
| | | | 1.119; | 476-478; | |
| | | | 289-300, | PKC_PHOSPHO_SITE | |
| | | | 1.109; | 535-537; | |
| | | | 511-519, | PKC_PHOSPHO_SITE | |
| | | | 1.106; 4-13, | 575-577; | |
| | | | 1.095; | CK2_PHOSPHO_SITE | |
| | | | 376-382, | 108-111; | |
| | | | 1.094; | CK2_PHOSPHO_SITE | |
| | | | 593-598, 1.09; | 174-177; | |
| | | | 101-107, | CK2_PHOSPHO_SITE | |
| | | | 1.084; | 186-189; | |
| | | | 525-531, | CK2_PHOSPHO_SITE | |
| | | | 1.077; | 236-239; | |
| | | | 568-577, | CK2_PHOSPHO_SITE | |
| | | | 1.075; | 332-335; | |
| | | | 39-45, 1.068; | CK2_PHOSPHO_SITE | |
| | | | 429-434, | 367-370; | |
| | | | 1.044; | CK2_PHOSPHO_SITE | |
| | | | 226-232, | 535-538; | |
| | | | 1.044; | MYRISTYL 30-35; | |
| | | | | MYRISTYL | |
| | | | | 36-41; | |
| | | | | MYRISTYL 66-71; | |
| | | | | MYRISTYL | |
| | | | | 470-475; | |
| | | | | MYRISTYL 580-585; | |
| | | | | MYRISTYL | |
| | | | | 592-597; | |
| DEX0488_{—} | N | 0 - | 4-36, 1.187; | PKC_PHOSPHO_SITE | POLO_box 16-67; |
| 019.aa.2 | | o1-86; | 44-65, 1.133; | 44-46; | POLO_BOX 16-67; |
| | | | 70-77, 1.1; | PKC_PHOSPHO_SITE | |
| | | | | 75-77; | |
| | | | | PKC_PHOSPHO_SITE | |
| | | | | 80-82; | |
| | | | | CK2_PHOSPHO_SITE | |
| | | | | 34-37; | |
| | | | | CK2_PHOSPHO_SITE | |
| | | | | 48-51; | |
| | | | | CK2_PHOSPHO_SITE | |
| | | | | 68-71; | |
| DEX0488_{—} | N | 0 - | 111-122, | PKC_PHOSPHO_SITE | |
| 019.orf.2 | | o1-162; | 1.253; | 7-9; | |
| | | | 128-159, | PKC_PHOSPHO_SITE | |
| | | | 1.182; | 12-14; | |
| | | | 83-105, 1.156; | PKC_PHOSPHO_SITE | |
| | | | 13-29, 1.141; | 18-20; | |
| | | | 52-59, 1.101; | MYRISTYL 70-75; | |
| | | | 61-68, 1.083; | MYRISTYL | |
| | | | 41-48, 1.082; | 79-84; | |
| | | | 74-81, 1.058; | MYRISTYL 85-90; | |
| | | | | MYRISTYL | |
| | | | | 94-99; | |
| | | | | MYRISTYL 105-110; | |
| DEX0488_{—} | N | 0 - | 125-136, | ASN_GLYCOSYLATION | sp_Q07832_PLK1_MOUSE |
| 019.aa.3 | | o1-442; | 1.231; | 385-388; | 59-305; |
| | | | 360-387, | CAMP_PHOSPHO_{—} | TYRKINASE 166-184; |
| | | | 1.202; | SITE 134-137; | TYRKINASE 232-254; |
| | | | 153-177, | CAMP_PHOSPHO_{—} | pkinase 53-305; |
| | | | 1.192; | SITE 207-210; | S_TKc 53-305; |
| | | | 104-117, | PKC_PHOSPHO_SITE | TyrKc 53-304; |
| | | | 1.186; | 49-51; | PROTEIN_KINASE_DOM |
| | | | 76-93, 1.163; | PKC PHOSPHO SITE | 53-305; |
| | | | 429-439, | 224-226; | PROTEIN_KINASE_ATP |
| | | | 1.149; | PKC_PHOSPHO_SITE | 59-82; |
| | | | 270-285, | 291-293; | PROTEIN_KINASE_ST |
| | | | 1.141; | PKC_PHOSPHO_SITE | 172-184; |
| | | | 229-249, | 335-337; | |
| | | | 1.137; | PKC_PHOSPHO_SITE | |
| | | | 40-47, 1.136; | 390-392; | |
| | | | 307-332, | PKC_PHOSPHO_SITE | |
| | | | 1.135; | 413-415; | |
| | | | 209-226, | CK2_PHOSPHO_SITE | |
| | | | 1.132; | 71-74; | |
| | | | 19-38, 1.128; | CK2_PHOSPHO_SITE | |
| | | | 252-263, | 137-140; | |
| | | | 1.109; | CK2_PHOSPHO_SITE | |
| | | | 339-345, | 149-152; | |
| | | | 1.094; | CK2_PHOSPHO_SITE | |
| | | | 392-404, | 199-202; | |
| | | | 1.085; | CK2_PHOSPHO_SITE | |
| | | | 64-70, 1.084; | 295-298; | |
| | | | 406-412, | CK2_PHOSPHO_SITE | |
| | | | 1.062; | 330-333; | |
| | | | 189-195, | CK2_PHOSPHO_SITE | |
| | | | 1.044; | 424-427; | |
| | | | | MYRISTYL 29-34; | |
| | | | | MYRISTYL | |
| | | | | 398-403; | |
| | | | | MYRISTYL 402-407; | |
| | | | | MYRISTYL | |
| | | | | 408-413; | |
| | | | | MYRISTYL 421-426; | |
| | | | | AMIDATION | |
| | | | | 415-418; | |
| DEX0488_{—} | N | 0 - | 9-23, 1.187; | PKC_PHOSPHO_SITE | POLO_box 3-54; |
| 019.aa.4 | | i1-73; | 31-52, 1.133; | 31-33; | POLO_BOX 7-54; |
| | | | 57-64, 1.1; | PKC_PHOSPHO_SITE | |
| | | | | 62-64; | |
| | | | | PKC_PHOSPHO_SITE | |
| | | | | 67-69; | |
| | | | | CK2_PHOSPHO_SITE | |
| | | | | 21-24; | |
| | | | | CK2_PHOSPHO_SITE | |
| | | | | 35-38; | |
| | | | | CK2_PHOSPHO_SITE | |
| | | | | 55-58; | |
| DEX0488_{—} | N | 0 - | 107-118, | MYRISTYL 66-71; | |
| 019.orf.4 | | o1-158; | 1.253; | MYRISTYL | |
| | | | 124-155, | 75-80; | |
| | | | 1.182; 4-12, | MYRISTYL 81-86; | |
| | | | 1.164; 79-101, | MYRISTYL | |
| | | | 1.156; | 90-95; | |
| | | | 15-25, 1.141; | MYRISTYL 101-106; | |
| | | | 48-55, 1.101; | | |
| | | | 57-64, 1.083; | | |
| | | | 37-44, 1.082; | | |
| | | | 70-77, 1.058; | | |
| DEX0488_{—} | N | 0 - | 4-10, 1.162; | ASN_GLYCOSYLATION | |
| 019.aa.5 | | o1-114; | 86-104, 1.121; | 108-111; | |
| | | | 51-63, 1.113; | PKC PHOSPHO SITE | |
| | | | 27-32, 1.066; | 45-47; | |
| | | | 12-18, 1.066; | PCK_PHOSPHO_SITE | |
| | | | 43-48, 1.037; | 65-67; | |
| DEX0488_{—} | N | 0 - | 15-36, 1.133; | PCK_PHOSPHO_SITE | POLO_BOX 1-38; |
| 019.aa.7 | | i1-57; | 41-48, 1.1; | 15-17; | |
| | | | | PCK_PHOSPHO_SITE | |
| | | | | 46-48; | |
| | | | | PCK_PHOSPHO_SITE | |
| | | | | 51-53; | |
| | | | | CK2_PHOSPHO_SITE | |
| | | | | 5-8; | |
| | | | | CK2_PHOSPHO_SITE | |
| | | | | 19-22; | |
| | | | | CK2_PHOSPHO_SITE | |
| | | | | 39-42; | |
| DEX0488_{—} | N | 1 - | 91-102, 1.253; | MYRISTYL 50-55; | |
| 019.orf.7 | | i1-115; | 108-139, | MYRISTYL | |
| | | tm116-138; | 1.182; | 59-64; | |
| | | o139-142; | 63-85, 1.156; | MYRISTYL 65-70; | |
| | | | 4-9, 1.141; | MYRISTYL | |
| | | | 32-39, 1.101; | 74-79; | |
| | | | 41-48, 1.083; | MYRISTYL 85-90; | |
| | | | 21-28, 1.082; | | |
| | | | 54-61, 1.058; | | |
| DEX0488_{—} | N | 0 - | 297-324, | ASN_GLYCOSYLATION | sp_Q07832_PLK1_MOUSE |
| 019.aa.8 | | o1-540; | 1.202; | 322-325; | 74-242; |
| | | | 90-114, 1.192; | ASN_GLYCOSYLATION | PRICHEXTENSN 32-44, |
| | | | 474-490, | 374-377; | PRICHEXTENSN |
| | | | 1.187; | ASN_GLYCOSYLATION | 49-65; |
| | | | 339-355, | 464-467; | PRICHEXTENSN 271-296; |
| | | | 1.164; | CAMP_PHOSPHO_{—} | TYRKINASE |
| | | | 42-79, 1.155; | SITE 144-147; | 103-121; TYRKINASE |
| | | | 4-15, 1.146; | CAMP_PHOSPHO_{—} | 169-191; POLO_box |
| | | | 207-222, | SITE 411-414; | 354-417; POLO_box |
| | | | 1.141; | PKC_PHOSPHO_SITE | 452-521; pkinase |
| | | | 456-466, | 5-7; | 2-242; S_TKc 9-242; |
| | | | 1.141; | PKC_PHOSPHO_SITE | TyrKc 2-241; |
| | | | 166-186, | 161-163; | POLO_BOX_1 354-417; |
| | | | 1.137; | PKC_PHOSPHO_SITE | POLO_BOX_2 |
| | | | 244-269, | 228-230; | 452-521; PRO_RICH |
| | | | 1.135; | PKC_PHOSPHO_SITE | 29-72; |
| | | | 498-519, | 272-274; | PROTEIN_KINASE_DOM |
| | | | 1.133; | PKC_PHOSPHO_SITE | 1-242; |
| | | | 146-163, | 327-329; | PROTEIN_KINASE_ST |
| | | | 1.132; | PKC_PHOSPHO_SITE | 109-121; |
| | | | 442-450, 1.13; | 355-357; | |
| | | | 359-374, | PKC_PHOSPHO_SITE | |
| | | | 1.119; | 376-378; | |
| | | | 399-407, | PKC_PHOSPHO_SITE | |
| | | | 1.119; | 435-437; | |
| | | | 189-200, | PKC_PHOSPHO_SITE | |
| | | | 1.109; | 498-500; | |
| | | | 411-419, | PKC_PHOSPHO_SITE | |
| | | | 1.106; | 529-531; | |
| | | | 524-531, 1.1; | PCK_PHOSPHO_SITE | |
| | | | 276-282, | 534-536; | |
| | | | 1.094; | CK2_PHOSPHO_SITE | |
| | | | 425-431, | 74-77; | |
| | | | 1.077; | CK2 PHOSPHO SITE | |
| | | | 31-40, 1.068; | 86-89; | |
| | | | 329-334, | CK2_PHOSPHO_SITE | |
| | | | 1.044; | 136-139; | |
| | | | 126-132, | CK2_PHOSPHO_SITE | |
| | | | 1.044; | 232-235; | |
| | | | | CK2_PHOSPHO_SITE | |
| | | | | 267-270; | |
| | | | | CK2_PHOSPHO_SITE | |
| | | | | 435-438; | |
| | | | | CK2_PHOSPHO_SITE | |
| | | | | 488-491; | |
| | | | | CK2_PHOSPHO_SITE | |
| | | | | 502-505; | |
| | | | | CK2_PHOSPHSO_SITE | |
| | | | | 522-525; | |
| | | | | MYRISTYL 18-23; | |
| | | | | MYRISTYL | |
| | | | | 38-43; | |
| | | | | MYRISTYL 370-375; | |
| DEX0488_{—} | N | 0 - | 16-63, 1.209; | CAMP_PHOSPHO_{—} | |
| 020.aa.1 | | o1-124; | 111-121, | SITE 66-69; | |
| | | | 1.171; | PKC_PHOSPHO_SITE | |
| | | | 76-92, 1.107; | 60-62; | |
| | | | 99-105, 1.037; | PKC_PHOSPHO_SITE | |
| | | | | 95-97; | |
| | | | | PKC_PHOSPHO_SITE | |
| | | | | 115-117; | |
| | | | | MYRISTYL 17-22; | |
| | | | | MYRISTYL | |
| | | | | 24-29; | |
| DEX0488_{—} | N | 0 - | 46-60, 1.269; | PKC_PHOSPHO_SITE | |
| 021.aa.1 | | o1-211; | 75-88, 1.205; | 63-65; | |
| | | | 130-143, | PKC_PHOSPHO_SITE | |
| | | | 1.167; | 68-70; | |
| | | | 164-179, | PKC_PHOSPHO_SITE | |
| | | | 1.149; | 115-117; | |
| | | | 16-24, 1.13; | PKC_PHOSPHO_SITE | |
| | | | 30-43, 1.129; | 161-163; | 25A_SYNTH_3 16-104; |
| | | | 145-161, | CK2_PHOSPHO_SITE | 25A_SYNTH_1 |
| | | | 1.127; | 73-76; | 61-80; |
| | | | 113-123, | CK2_PHOSPHO_SITE | |
| | | | 1.106; | 86-89; | |
| | | | 185-191, | MYRISTYL 60-65; | |
| | | | 1.062; 8-14, | MYRISTYL | |
| | | | 1.033; | 126-131; | |
| | | | | MYRISTYL 156-161; | |
| DEX0488_{—} | N | 0 - | 79-93, 1.269; | ASN_GLYCOSYLATION | 25A_SYNTH_3 49-137; |
| 021.orf.1 | | o1-244; | 17-33, 1.208; | 2-5; | 25A_SYNTH_1 |
| | | | 108-121, | PKC_PHOSPHO_SITE | 94-113; |
| | | | 1.205; | 12-14; | |
| | | | 163-176, | PKC_PHOSPHO_SITE | |
| | | | 1.167; | 96-98; | |
| | | | 198-212, | PKC_PHOSPHO_SITE | |
| | | | 1.149; | 101-103; | |
| | | | 49-57, 1.13; | PKC_PHOSPHO_SITE | |
| | | | 63-76, 1.129; | 148-150; | |
| | | | 178-191, | CK2 PHOSPHO SITE | |
| | | | 1.127; | 12-15; | |
| | | | 146-156, | CK2_PHOSPHO_SITE | |
| | | | 1.106; | 32-35; | |
| | | | 218-224, | CK2_PHOSPHO_SITE | |
| | | | 1.062; | 106-109; | |
| | | | 41-47, 1.033; | CK2_PHOSPHO_SITE | |
| | | | | 119-122; | |
| | | | | MYRISTYL 1-6; | |
| | | | | MYRISTYL 93-98; | |
| | | | | MYRISTYL | |
| | | | | 159-164; | |
| | | | | MYRISTYL 189-194; | |
| DEX0488_{—} | N | 0 - | 36-52, 1.149; | MYRISTYL 15-20; | 25A_SYNTH_2 4-14; |
| 021.aa.2 | | o1-84; | 4-11, 1.12; | | |
| | | | 58-64, 1.062; | | |
| DEX0488_{—} | N | 0 - | 108-120, 1.2; | PKC_PHOSPHO_SITE | |
| 021.orf.2 | | o1-123; | 94-104, 1.165; | 17-19; | |
| | | | 63-84, 1.158; | CK2_PHOSPHO_SITE | |
| | | | 4-15, 1.135; | 40-43; | |
| | | | 35-45, 1.107; | TYR_PHOSPHO_SITE | |
| | | | 47-53, 1.034; | 95-102; | |
| | | | | MYRISTYL 24-29; | |
| | | | | MYRISTYL | |
| | | | | 105-110; | |
| DEX0488_{—} | N | 0 - | 13-24, 1.128; | | |
| 022.aa.1 | | o1-37; | 4-11, 1.081; | | |
| DEX0488_{—} | Y | 0 - | 4-53, 1.209; | ASN_GLYCOSYLATION | |
| 022.orf.1 | | o1-84; | 58-81, 1.133; | 39-42; | |
| | | | | PKC_PHOSPHO_SITE | |
| | | | | 3-5; | |
| | | | | PKC_PHOSPHO_SITE | |
| | | | | 53-55; | |
| | | | | PKC_PHOSPHO_SITE | |
| | | | | 82-84; | |
| | | | | MYRISTYL 57-62; | |
| DEX0488_{—} | N | 0 - | 99-134, 1.202; | ASN_GLYCOSYLATION | Gal-bind_lectin |
| 022.aa.2 | | o1-288; | 234-261, | 34-37; | 16-147; GLECT 15-148; |
| | | | 1.196; | ASN_GLYCOSYLATION | GALAPTIN 82-101; |
| | | | 150-172, | 79-82; | |
| | | | 1.156; 5-19, | ASN_GLYCOSYLATION | |
| | | | 1.143; | 137-140; | |
| | | | 136-147, | PKC_PHOSPHO_SITE | |
| | | | 1.141; | 184-186; | |
| | | | 69-76, 1.136; | PKC_PHOSPHO_SITE | |
| | | | 215-229, | 213-215; | |
| | | | 1.114; | PKC_PHOSPHO_SITE | |
| | | | 275-285, | 225-227; | |
| | | | 1.098; | PKC_PHOSPHO_SITE | |
| | | | 26-40, 1.084; | 249-251; | |
| | | | 186-192, | CK2_PHOSPHO_SITE | |
| | | | 1.071; | 54-57; | |
| | | | | TYR_PHOSPHO_SITE | |
| | | | | 65-71; | |
| | | | | MYRISTYL 19-24, | |
| | | | | MYRISTYL | |
| | | | | 24-29; | |
| | | | | MYRISTYL 28-33; | |
| | | | | MYRISTYL | |
| | | | | 35-40; | |
| | | | | MYRISTYL 42-47; | |
| | | | | MYRISTYL | |
| | | | | 55-60; | |
| | | | | AMIDATION | |
| | | | | 175-178; | |
| DEX0488_{—} | N | 0 - | 99-134, 1.202; | ASN_GLYCOSYLATION | Gal-bind_lectin |
| 022.aa.3 | | o1-221; | 150-172, | 34-37; | 16-147; GLECT 15-148; |
| | | | 1.156; | ASN_GLYCOSYLATION | GALAPTIN 82-101; |
| | | | 206-218, | 79-82; | |
| | | | 1.148; 5-19, | ASN_GLYCOSYLATION | |
| | | | 1.143; | 137-140; | |
| | | | 136-147, | CK2_PHOSPHO_SITE | |
| | | | 1.141; | 54-57; | |
| | | | 69-76, 1.136; | TYR_PHOSPHO_SITE | |
| | | | 181-201, | 65-71; | |
| | | | 1.126; | MYRISTYL 19-24; | |
| | | | 26-40, 1.084; | MYRISTYL | |
| | | | | 24-29; | |
| | | | | MYRISTYL 28-33; | |
| | | | | MYRISTYL | |
| | | | | 35-40; | |
| | | | | MYRISTYL 42-47; | |
| | | | | MYRISTYL | |
| | | | | 55-60; | |
| | | | | AMIDATION | |
| | | | | 175-178; | |
| DEX0488_{—} | N | 0 - | 99-134, 1.202; | ASN_GLYCOSYLATION | Gal-bind_lectin |
| 022.aa.5 | | o1-246; | 178-229, | 34-37; | 16-147; GLECT 15-148; |
| | | | 1.182; 5-19, | ASN_GLYCOSYLATION | GALAPTIN 82-101; |
| | | | 1.143; | 79-82; | |
| | | | 136-155, | ASN_GLYCOSYLATION | |
| | | | 1.141; | 137-140; | |
| | | | 157-171, | ASN_GLYCOSYLATION | |
| | | | 1.137; | 242-245; | |
| | | | 69-76, 1.136; | CK2_PHOSPHO_SITE | |
| | | | 237-243, | 54-57; | |
| | | | 1.098; | TYR_PHOSPHO_SITE | |
| | | | 26-40, 1.084; | 65-71; | |
| | | | | MYRISTYL 19-24; | |
| | | | | MYRISTYL | |
| | | | | 24-29; | |
| | | | | MYRISTYL 28-33; | |
| | | | | MYRISTYL | |
| | | | | 35-40; | |
| | | | | MYRISTYL 42-47; | |
| | | | | MYRISTYL | |
| | | | | 55-60; | |
| | | | | MYRISTYL 151-156; | |
| | | | | MYRISTYL | |
| | | | | 173-178; | |
| | | | | MYRISTYL 202-207; | |
| DEX0488_{—} | N | 0 - | 60-110, 1.209; | ASN_GLYCOSYLATION | |
| 022.aa.6 | | o1-141; | 20-39, 1.142; | 96-99; | |
| | | | 115-138, | PKC_PHOSPHO_SITE | |
| | | | 1.133; 4-11, | 15-17; | |
| | | | 1.042; | PKC_PHOSPHO_SITE | |
| | | | | 110-112; | |
| | | | | PKC_PHOSPHO_SITE | |
| | | | | 139-141; | |
| | | | | MYRISTYL 14-19; | |
| | | | | MYRISTYL | |
| | | | | 114-119; | |
| DEX0488_{—} | N | 0 - | 43-90, 1.142; | PKC_PHOSPHO_SITE | PRICHEXTENSN 36-52; |
| 022.aa.7 | | o1-93; | 4-12, 1.094; | 38-40; | PRICHEXTENSN |
| | | | 26-34, 1.042; | PKC_PHOSPHO_SITE | 66-78; |
| | | | | 74-76; | |
| | | | | CK2_PHOSPHO_SITE | |
| | | | | 82-85; | |
| | | | | MYRISTYL 37-42; | |
| DEX0488_{—} | N | 0 - | 6-29, 1.176; | CK2_PHOSPHO_SITE | ANKYRIN 6-18; |
| 022.aa.8 | | o1-66; | 37-46, 1.163; | 50-53; | ANKYRIN 18-30; ank |
| | | | 53-63, 1.098; | MYRISTYL 29-34; | 5-37; ANK 5-34; |
| | | | | MYRISTYL | ANK_REPEAT 5-37; |
| | | | | 48-53; | ANK_REP_REGION 1-37; |
| DEX0488_{—} | N | 0 - | 62-85, 1.133; | ASN_GLYCOSYLATION | |
| 022.orf.8 | | o1-88; | 31-57, 1.121; | 43-46; | |
| | | | 13-23, 1.092; | CAMP_PHOSPHO_{—} | |
| | | | 4-11, 1.068; | SITE 26-29; | |
| | | | | PKC_PHOSPHO_SITE | |
| | | | | 25-27; | |
| | | | | PKC_PHOSPHO_SITE | |
| | | | | 29-31; | |
| | | | | PKC_PHOSPHO_SITE | |
| | | | | 57-59; | |
| | | | | PKC_PHOSPHO_SITE | |
| | | | | 86-88; | |
| | | | | MYRISTYL 5-10; | |
| | | | | MYRISTYL | |
| | | | | 15-20; | |
| | | | | MYRISTYL 24-29; | |
| | | | | MYRISTYL | |
| | | | | 61-66; | |
| DEX0488_{—} | N | 0 - | 28-46, 1.147; | ASN_GLYCOSYLATION | sp_p33991_MCM4_HUMAN |
| 023.aa.1 | | o1-192; | 107-115, | 8-11; | 45-99; |
| | | | 1.138; | PKC_PHOSPHO_SITE | |
| | | | 12-21, 1.121; | 51-53; | |
| | | | 131-141, | PKC_PHOSPHO_SITE | |
| | | | 1.118; | 79-81; | |
| | | | 144-154, | PKC_PHOSPHO_SITE | |
| | | | 1.102; | 122-124; | |
| | | | 55-88, | PKC_PHOSPHO_SITE | |
| | | | 1.096; | 123-125; | |
| | | | 181-189, | PKC_PHOSPHO_SITE | |
| | | | 1.067; | 185-187; | |
| | | | | PKC_PHOSPHO_SITE | |
| | | | | 188-190; | |
| | | | | CK2_PHOSPHO_SITE | |
| | | | | 101-104; | |
| | | | | MYRISTYL 50-55; | |
| | | | | MYRISTYL | |
| | | | | 54-59; | |
| | | | | MYRISTYL 118-123; | |
| DEX0488_{—} | N | 0 - | 43-53, 1.14; | ASN_GLYCOSYLATION | |
| 023.aa.2 | | 01-95; | 84-92, 1.067; | 31-34; | |
| | | | | PKC_PHOSPHO_SITE | |
| | | | | 88-90; | |
| | | | | PKC_PHOSPHO_SITE | |
| | | | | 91-93; | |
| | | | | CK2_PHOSPHO_SITE | |
| | | | | 33-36; | |
| | | | | CK2_PHOSPHO_SITE | |
| | | | | 37-40; | |
| DEX0488_{—} | N | 2 - | 34-55, 1.267; | PKC_PHOSPHO_SITE | EGF_1 50-61; |
| 023.orf.2 | | i1-37; | 57-73, 1.234; | 11-13; | |
| | | tm38-60; | 92-100, 1.117; | PKC_PHOSPHO_SITE | |
| | | o61-79; | 4-17, 1.108; | 17-19; | |
| | | tm80-102; | 81-89, 1.098; | PKC_PHOSPHO_SITE | |
| | | i103-103; | | 30-32; | |
| | | | | MYRISTYL 46-51; | |
| | | | | MYRISTYL | |
| | | | | 79-84; | |
| DEX0488_{—} | N | 0 - | 99-108, 1.202; | ASN_GLYCOSYLATION | Gal-bind_lectin |
| 024.aa.1 | | o1-316; | 171-196, | 177-180; | 16-209; GLECT 15-210; |
| | | | 1.157; | ASN_GLYCOSYLATION | GALAPTIN 82-101; |
| | | | 212-234, | 199-202; | |
| | | | 1.156; | CAMP_PHOSPHO_SITE | |
| | | | 30-50, 1.144; | 128-131; | |
| | | | 4-19, 1.143; | CAMP_PHOSPHO_SITE | |
| | | | 198-209, | 158-161; | |
| | | | 1.141; | PKC_PHOSPHO_SITE | |
| | | | 251-265, | 116-118; | |
| | | | 1.137; | PKC_PHOSPHO_SITE | |
| | | | 69-76, | 161-163; | |
| | | | 1.136; | PKC_PHOSPHO_SITE | |
| | | | 295-313, | 245-247; | |
| | | | 1.119; | CK2_PHOSPHO_SITE | |
| | | | 273-293, | 54-57; | |
| | | | 1.098; | TYR_PHOSPHO_SITE | |
| | | | 243-249, | 65-71; | |
| | | | 1.075; | MYRISTYL 19-24; | |
| | | | 129-135, | MYRISTYL | |
| | | | 1.065; | 24-29; | |
| | | | | MYRISTYL 35-40; | |
| | | | | MYRISTYL | |
| | | | | 42-47; | |
| | | | | MYRISTYL 55-60; | |
| | | | | MYRISTYL | |
| | | | | 267-272; | |
| | | | | MYRISTYL 297-302; | |
| | | | | AMIDATION | |
| | | | | 156-159; | |
| | | | | AMIDATION | |
| | | | | 237-240; | |
| DEX0488_{—} | Y | 0 - | 101-151, | ASN_GLYCOSYLATION | |
| 024.orf.1 | | o1-182; | 1.209; 9-27, | 137-140; | |
| | | | 1.18; 166-179, | PKC_PHOSPHO_SITE | |
| | | | 1.133; | 29-31; | |
| | | | 61-79, 1.119; | PKC_PHOSPHO_SITE | |
| | | | 44-54, 1.042; | 151-153; | |
| | | | 156-162, | PKC_PHOSPHO_SITE | |
| | | | 1.038; | 180-182; | |
| | | | | MYRISTYL 9-14; | |
| | | | | MYRISTYL | |
| | | | | 55-60; | |
| | | | | MYRISTYL 155-160; | |
| DEX0488_{—} | N | 0 - | 60-110, 1.209; | ASN_GLYCOSYLATION | |
| 024.aa.2 | | o1-141; | 125-138, | 96-99; | |
| | | | 1.133; | PKC_PHOSPHO_SITE | |
| | | | 20-38, 1.119; | 110-112; | |
| | | | 4-13, 1.042; | PKC_PHOSPHO_SITE | |
| | | | 115-121, | 139-141; | |
| | | | 1.038; | MYRISTYL 14-19; | |
| | | | | MYRISTYL | |
| | | | | 114-119; | |
| DEX0488_{—} | N | 0 - | 757-784, | ASN_GLYCOSYLATION | |
| 025.aa.1 | | o1-791; | 1.262; | 687-690; | |
| | | | 721-732, | CAMP_PHOSPHO_{—} | |
| | | | 1.239; | SITE 316-319; | |
| | | | 53-93, 1.237; | CAMP_PHOSPHO_{—} | |
| | | | 15-47, 1.216; | SITE 348-351; | |
| | | | 561-593, | PKC_PHOSPHO_SITE | |
| | | | 1.215; | 46-48; | |
| | | | 530-554, | PKC_PHOSPHO_SITE | |
| | | | 1.191; | 183-185; | |
| | | | 737-752, 1.19; | PKC_PHOSPHO_SITE | |
| | | | 425-435, | 427-429; | |
| | | | 1.182; | PKC_PHOSPHO_SITE | |
| | | | 459-475, 1.17; | 435-437; | |
| | | | 658-672, | PKC_PHOSPHO_SITE | |
| | | | 1.161; | 439-441; | |
| | | | 186-203, | PKC_PHOSPHO_SITE | |
| | | | 1.158; | 497-499; | |
| | | | 95-138, 1.146; | PKC_PHOSPHO_SITE | |
| | | | 635-647, | 548-550; | |
| | | | 1.146; | PKC_PHOSPHO_SITE | |
| | | | 248-294, | 624-626; | |
| | | | 1.143; | PKC_PHOSPHO_SITE | |
| | | | 208-227, | 650-652; | |
| | | | 1.131; | PKC_PHOSPHO_SITE | |
| | | | 708-719, | 699-701; | |
| | | | 1.126; | CK2_PHOSPHO_SITE | |
| | | | 360-382, | 47-50; | |
| | | | 1.125; | CK2_PHOSPHO_SITE | |
| | | | 332-349, | 133-136; | |
| | | | 1.119; | CK2_PHOSPHO_SITE | |
| | | | 685-694, | 309-312; | |
| | | | 1.115; | CK2_PHOSPHO_SITE | |
| | | | 387-408, | 372-375; | |
| | | | 1.112; | CK2_PHOSPHO_SITE | |
| | | | 601-611, | 418-421; | |
| | | | 1.102; | CK2_PHOSPHO_SITE | |
| | | | 480-488, | 502-505; | |
| | | | 1.087; | CK2_PHOSPHO_SITE | |
| | | | 177-183, | 509-512; | |
| | | | 1.086; | CK2 PHOSPHO SITE | |
| | | | 439-449, 1.07; | 514-517; | |
| | | | 519-525, | CK2_PHOSPHO_SITE | |
| | | | 1.068; | 656-659; | |
| | | | 166-174, | CK2_PHOSPHO_SITE | |
| | | | 1.061; 4-10, | 679-682; | |
| | | | 1.051; | CK2_PHOSPHO_SITE | |
| | | | 147-153, | 763-766; | |
| | | | 1.031; | MYRISTYL 34-39; | |
| | | | | MYRISTYL | |
| | | | | 51-56; | |
| | | | | MYRISTYL 53-58; | |
| | | | | MYRISTYL | |
| | | | | 153-158; | |
| | | | | MYRISTYL 179-184; | |
| | | | | MYRISTYL | |
| | | | | 293-298; | |
| | | | | MYRISTYL 297-302; | |
| | | | | MYRISTYL | |
| | | | | 356-361; | |
| | | | | MYRISTYL 477-482; | |
| | | | | MYRISTYL | |
| | | | | 647-652; | |
| | | | | LEUCINE_ZIPPER | |
| | | | | 549-570; | |
| DEX0488_{—} | N | 0 - | 692-719, | ASN_GLYCOSYLATION | |
| 025.orf.1 | | o1-726; | 1.262; | 622-625; | |
| | | | 656-667, | CAMP_PHOSPHO_{—} | |
| | | | 1.239; | SITE 251-254; | |
| | | | 496-528, | CAMP_PHOSPHO_{—} | |
| | | | 1.215; 4-28, | SITE 283-286; | |
| | | | 1.202; | PKC_PHOSPHO_SITE | |
| | | | 465-489, | 118-120; | |
| | | | 1.191; | PKC_PHOSPHO_SITE | |
| | | | 672-687, 1.19; | 362-364; | |
| | | | 360-370, | PKC_PHOSPHO_SITE | |
| | | | 1.182; | 370-372; | |
| | | | 394-410, 1.17; | PKC_PHOSPHO_SITE | |
| | | | 593-607, | 374-376; | |
| | | | 1.161; | PKC_PHOSPHO_SITE | |
| | | | 121-138, | 432-434; | |
| | | | 1.158; | PKC_PHOSPHO_SITE | |
| | | | 30-73, 1.146; | 483-485; | |
| | | | 570-582, | PKC_PHOSPHO_SITE | |
| | | | 1.146; | 559-561; | |
| | | | 183-229, | PKC_PHOSPHO_SITE | |
| | | | 1.143; | 585-587; | |
| | | | 143-162, | PKC_PHOSPHO_SITE | |
| | | | 1.131; | 634-636; | |
| | | | 643-654, | CK2_PHOSPHO_SITE | |
| | | | 1.126; | 68-71; | |
| | | | 295-317, | CK2_PHOSPHO_SITE | |
| | | | 1.125; | 244-247; | |
| | | | 267-284, | CK2_PHOSPHO_SITE | |
| | | | 1.119; | 307-310; | |
| | | | 620-629, | CK2_PHOSPHO_SITE | |
| | | | 1.115; | 353-356; | |
| | | | 322-343, | CK2_PHOSPHO_SITE | |
| | | | 1.112; | 437-440; | |
| | | | 536-546, | CK2_PHOSPHO_SITE | |
| | | | 1.102; | ITE 444-447; | |
| | | | 415-423, | CK2_PHOSPHO_SITE | |
| | | | 1.087; | 449-452; | |
| | | | 112-118, | CK2_PHOSPHO_SITE | |
| | | | 1.086; | 591-594; | |
| | | | 374-384, 1.07; | CK2_PHOSPHO_SITE | |
| | | | 454-460, | 614-617; | |
| | | | 1.068; | CK2_PHOSPHO_SITE | |
| | | | 101-109, | 698-701; | |
| | | | 1.061; | MYRISTYL 88-93; | |
| | | | 82-88, 1.031; | MYRISTYL | |
| | | | | 114-119; | |
| | | | | MYRISTYL 228-233; | |
| | | | | MYRISTYL | |
| | | | | 232-237; | |
| | | | | MYRISTYL 291-296; | |
| | | | | MYRISTYL | |
| | | | | 412-417; | |
| | | | | MYRISTYL 582-587; | |
| | | | | LEUCINE_ZIPPER | |
| | | | | 484-505; | |
| DEX0488_{—} | N | 0 - | 38-60, 1.237; | CK2_PHOSPHO_SITE | |
| 025.aa.2 | | o1-88; | 62-84, 1.224; | 29-32; | |
| | | | 4-31, 1.185; | | |
| DEX0488_{—} | N | 0 - | 214-222, | CAMP_PHOSPHO_{—} | Ribosomal_L4 79-272; |
| 026.aa.1 | | o1-322; | 1.199; | SITE 107-110; | |
| | | | 159-187, | PKC_PHOSPHO_SITE | |
| | | | 1.167; | 57-59; | |
| | | | 239-277, | PKC_PHOSPHO_SITE | |
| | | | 1.164; | 68-70; | |
| | | | 76-101, 1.146; | PKC_PHOSPHO_SITE | |
| | | | 285-303, | 133-135; | |
| | | | 1.139; | PKC_PHOSPHO_SITE | |
| | | | 44-69, 1.132; | 140-142; | |
| | | | 307-314, | PKC_PHOSPHO_SITE | |
| | | | 1.092; | 179-181; | |
| | | | 200-209, | PKC_PHOSPHO_SITE | |
| | | | 1.084; | 234-236; | |
| | | | 228-234, | PKC_PHOSPHO_SITE | |
| | | | 1.077; | 303-305; | |
| | | | 36-41, 1.071; | CK2_PHOSPHO_SITE | |
| | | | 20-27, 1.068; | 23-26; | |
| | | | 189-196, | CK2_PHOSPHO_SITE | |
| | | | 1.066; | 116-119; | |
| | | | | CK2_PHOSPHO_SITE | |
| | | | | 222-225; | |
| | | | | CK2_PHOSPHO_SITE | |
| | | | | 229-232; | |
| | | | | MYRISTYL 132-137; | |
| | | | | MYRISTYL | |
| | | | | 148-153; | |
| | | | | MYRISTYL 173-178; | |
| | | | | AMIDATION | |
| | | | | 123-126; | |
| DEX0488_{—} | N | 0 - | | CAMP_PHOSPHO_{—} | Ribosomal_L4 102-295; |
| 026.orf.1 | | o1-345; | | SITE 130-133; | |
| | | | | PKC_PHOSPHO_SITE | |
| | | | | 14-16; | |
| | | | | PKC_PHOSPHO_SITE | |
| | | | | 80-82; | |
| | | | | PKC_PHOSPHO_SITE | |
| | | | | 91-93; | |
| | | | | PKC_PHOSPHO_SITE | |
| | | | | 156-158; | |
| | | | | PKC_PHOSPHO_SITE | |
| | | | | 163-165; | |
| | | | | PKC_PHOSPHO_SITE | |
| | | | | 202-204; | |
| | | | | PKC_PHOSPHO_SITE | |
| | | | | 257-259; | |
| | | | | PKC_PHOSPHO_SITE | |
| | | | | 326-328; | |
| | | | | CK2_PHOSPHO_SITE | |
| | | | | 46-49; | |
| | | | | CK2_PHOSPHO_SITE | |
| | | | | 139-142; | |
| | | | | CK2_PHOSPHO_SITE | |
| | | | | 245-248; | |
| | | | | CK2_PHOSPHO_SITE | |
| | | | | 252-255; | |
| | | | | MYRISTYL 17-22; | |
| | | | | MYRISTYL | |
| | | | | 19-24; | |
| | | | | MYRISTYL 155-160; | |
| | | | | MYRISTYL | |
| | | | | 171-176; | |
| | | | | MYRISTYL 196-201; | |
| | | | | AMIDATION | |
| | | | | 146-149; | |
| DEX0488_{—} | N | 0 - | 200-214, | ASN_GLYCOSYLATION | NGELATINASE 101-113; |
| 027.aa.1 | | o1-278; | 1.206; | 165-168; | NGELATINASE |
| | | | 255-275, | CAMP_PHOSPHO_{—} | 127-137; |
| | | | 1.184; | SITE 224-227; | NGELATINASE 151-170; |
| | | | 25-43, 1.176; | CK2_PHOSPHO_SITE | NGELATINASE |
| | | | 50-78, 1.173; | 18-21; | 178-197; |
| | | | 130-140, | CK2_PHOSPHO_SITE | NGELATINASE 205-223; |
| | | | 1.144; | 103-106; | NGELATINASE |
| | | | 82-100, 1.143; | CK2_PHOSPHO_SITE | 232-250; |
| | | | 105-121, | 154-157; | NGELATINASE 255-271; |
| | | | 1.136; | MYRISTYL 94-99; | LIPOCALIN |
| | | | 181-191, | MYRISTYL | 125-137; LIPOCALIN |
| | | | 1.129; | 135-140; | 210-222; LIPOCALIN |
| | | | 164-179, | MYRISTYL 186-191; | 237-252; |
| | | | 1.129; 4-20, | MYRISTYL | MAJORURINARY 128-146; |
| | | | 1.127; | 195-200; | MAJORURINARY |
| | | | 218-226, | MYRISTYL 260-265; | 231-252; |
| | | | 1.117; | | MAJORURINARY 259-276; |
| | | | 152-158, | | VNEBNERGLAND |
| | | | 1.078; | | 125-139; |
| | | | | | VNEBNERGLAND 237-260; |
| | | | | | A1MCGLOBULIN |
| | | | | | 119-132; |
| | | | | | A1MCGLOBULIN 201-220; |
| | | | | | A1MCGLOBULIN |
| | | | | | 232-253; |
| | | | | | A1MCGLOBULIN 260-278; |
| | | | | | PGNDSYNTHASE |
| | | | | | 119-142; |
| | | | | | PGNDSYNTHASE 199-222; |
| | | | | | PGNDSYNTHASE |
| | | | | | 234-248; |
| | | | | | PGNDSYNTHASE 251-269; |
| | | | | | lipocalin |
| | | | | | 126-275; LIPOCALIN |
| | | | | | 121-134; |
| DEX0488_{—} | N | 0 - | 24-38, 1.206; | CAMP_PHOSPHO_{—} | LIPOCALIN 34-46; |
| 027.aa.2 | | i1-102; | 79-99, 1.184; | SITE 48-51 | LIPOCALIN 61-76; |
| | | | 42-50, 1.117; | PKC_PHOSPHPO_SITE | MAJORURINARY 34-49; |
| | | | | 7-9; | MAJORURINARY |
| | | | | MYRISTYL 19-24; | 55-76; |
| | | | | MYRISTYL | MAJORURINARY 83-100; |
| | | | | 84-89; | A1MCGLOBULIN |
| | | | | | 25-44; |
| | | | | | A1MCGLOBULIN 56-77; |
| | | | | | A1MCGLOBULIN |
| | | | | | 84-102; |
| | | | | | PGNDSYNTHASE 23-46; |
| | | | | | PGNDSYNTHASE |
| | | | | | 58-72; |
| | | | | | PGNDSYNTHASE 75-93; |
| DEX0488_{—} | N | 0 - | 4-25, 1.206; | CAMP_PHOSPHO_{—} | LIPOCALIN 21-33; |
| 027.aa.3 | | o1-89; | 66-86, 1.184; | SITE 35-38; | LIPOCALIN 48-63; |
| | | | 29-37, 1.117; | MYRISTYL 71-76; | MAJORURINARY 21-36; |
| | | | | | MAJORURINARY |
| | | | | | 42-63; |
| | | | | | MAJORURINARY 70-87; |
| | | | | | A1MCGLOBULIN |
| | | | | | 12-31; |
| | | | | | A1MCGLOBULIN 43-64; |
| | | | | | A1MCGLOBULIN |
| | | | | | 71-89; |
| | | | | | PGNDSYNTHASE 10-33; |
| | | | | | PGNDSYNTHASE |
| | | | | | 45-59; |
| | | | | | PGNDSYNTHASE 62-80; |
| DEX0488_{—} | N | 0 - | 4-18, 1.259; | CAMP_PHOSPHO_{—} | LIPOCALIN 14-26; |
| 027.aa.4 | | o1-82; | 59-79, 1.184; | SITE 28-31; | LIPOCALIN 41-56; |
| | | | 22-30, 1.117; | MYRISTYL 64-69; | MAJORURINARY 14-29; |
| | | | | | MAJORURINARY |
| | | | | | 35-56; |
| | | | | | MAJORURINARY 63-80; |
| | | | | | A1MCGLOBULIN |
| | | | | | 5-24; A1MCGLOBULIN |
| | | | | | 36-57; |
| | | | | | A1MCGLOBULIN 64-82; |
| | | | | | PGNDSYNTHASE |
| | | | | | 3-26; PGNDSYNTHASE |
| | | | | | 38-52; |
| | | | | | PGNDSYNTHASE 55-73; |
| DEX0488_{—} | N | 0 - | 4-18, 1.259; | CAMP_PHOSPHO_{—} | LIPOCALIN 14-26; |
| 027.orf.4 | | o1-82; | 59-79, 1.184; | SITE 28-31; | LIPOCALIN 41-56; |
| | | | 22-30, 1.117; | MYRISTYL 64-69; | MAJORURINARY 14-29; |
| | | | | | MAJORURINARY |
| | | | | | 35-56; |
| | | | | | MAJORURINARY 63-80; |
| | | | | | A1MCGLOBULIN |
| | | | | | 5-24; A1MCGLOBULIN |
| | | | | | 36-57; |
| | | | | | A1MCGLOBULIN 64-82; |
| | | | | | PGNDSYNTHASE |
| | | | | | 3-26; PGNDSYNTHASE |
| | | | | | 38-52; |
| | | | | | PGNDSYNTHASE 55-73; |
| DEX0488_{—} | N | 0 - | 208-222, | ASN_GLYCOSYLATION | SEA 265-331; |
| 028.aa.1 | | o1-396 | 1.186; | 31-34; | |
| | | | 224-236, | ASN_GLYCOSYLATION | |
| | | | 1.175; | 51-54; | |
| | | | 238-256, | ASN_GLYCOSYLATION | |
| | | | 1.165; | 146-149; | |
| | | | 54-67, 1.161; | ASN_GLYCOSYLATION | |
| | | | 71-83, 1.159; | 163-166; | |
| | | | 182-205, | ASN_GLYCOSYLATION | |
| | | | 1.153; | 205-208; | |
| | | | 94-142, 1.146; | ASN_GLYCOSYLATION | |
| | | | 317-335, | 238-241; | |
| | | | 1.134; | ASN_GLYCOSYLATION | |
| | | | 337-361, | 277-280; | |
| | | | 1.126; | ASN_GLYCOSYLATION | |
| | | | 155-162, | 314-317; | |
| | | | 1.906; | CAMP_PHOSPHO_{—} | |
| | | | 370-377, | SITE 11-14; | |
| | | | 1.095; | PKC_PHOSPHO_SITE | |
| | | | 20-32, 1.087; | 14-16; | |
| | | | 172-180, | PKC_PHOSPHO_SITE | |
| | | | 1.084; | 81-83; | |
| | | | 260-267, | PKC_PHOSPHO_SITE | |
| | | | 1.079; | 148-150; | |
| | | | 270-278, | PKC_PHOSPHO_SITE | |
| | | | 1.078; | 197-199; | |
| | | | 380-388, | PKC_PHOSPHO_SITE | |
| | | | 1.056; | 214-216; | |
| | | | 35-40, 1.054; | PKC_PHOSPHO_SITE | |
| | | | 281-288, | 316-318; | |
| | | | 1.046; | PKC_PHOSPHO_SITE | |
| | | | | 328-330; | |
| | | | | PKC_PHOSPHO_SITE | |
| | | | | 366-368; | |
| | | | | PKC_PHOSPHO_SITE | |
| | | | | 373-375; | |
| | | | | CK2_PHOSPHO_SITE | |
| | | | | 91-94; | |
| | | | | CK2_PHOSPHO_SITE | |
| | | | | 165-168; | |
| | | | | CK2_PHOSPHO_SITE | |
| | | | | 170-173; | |
| | | | | CK2_PHOSPHO_SITE | |
| | | | | 221-224; | |
| | | | | CK2_PHOSPHO_SITE | |
| | | | | 226-229; | |
| | | | | CK2_PHOSPHO_SITE | |
| | | | | 256-259; | |
| | | | | CK2_PHOSPHO_SITE | |
| | | | | 338-341; | |
| | | | | MYRISTYL 88-93; | |
| | | | | MYRISTYL | |
| | | | | 92-97; | |
| | | | | MYRISTYL 388-393; | |
| DEX0488_{—} | N | 1 - | 400-427, | ASN_GLYCOSYLATION | RHESUSRHD 200-216; |
| 028.orf.1 | | o1-401; tm402-424; | 1.248; | 28-31; | RHESUSRHD 408-424; |
| | | i425-456; | 205-219, | ASN_GLYCOSYLATION | SEA 262-328; |
| | | | 1.186; | 48-51; | |
| | | | 221-233, | ASN_GLYCOSYLATION | |
| | | | 1.175; | 143-146; | |
| | | | 235-253, | ASN_GLYCOSYLATION | |
| | | | 1.165; | 160-163; | |
| | | | 51-64, 1.161; | ASN_GLYCOSYLATION | |
| | | | 68-80, 1.159; | 202-205; | |
| | | | 179-202, | ASN_GLYCOSYLATION | |
| | | | 1.153; | 235-238; | |
| | | | 91-139, 1.146; | ASN_GLYCOSYLATION | |
| | | | 314-332, | 274-277; | |
| | | | 1.134; | ASN_GLYCOSYLATION | |
| | | | 376-385, | 311-314; | |
| | | | 1.133; | ASN_GLYCOSYLATION | |
| | | | 334-358, | 372-375; | |
| | | | 1.126; | CAMP_PHOSPHO_{—} | |
| | | | 437-453, | SITE 8-11; | |
| | | | 1.111; | PKC_PHOSPHO_SITE | |
| | | | 152-159, | 11-13; | |
| | | | 1.096; | PKC_PHOSPHO_SITE | |
| | | | 17-29, 1.087; | 78-80; | |
| | | | 169-177, | PKC_PHOSPHO_SITE | |
| | | | 1.084; | 145-147; | |
| | | | 257-264, | PKC_PHOSPHO_SITE | |
| | | | 1.079; | 194-196; | |
| | | | 267-275, | PKC_PHOSPHO_SITE | |
| | | | 1.078; | 211-213; | |
| | | | 32-37, 1.054; | PKC_PHOSPHO_SITE | |
| | | | 278-285, | 313-315; | |
| | | | 1.046; | PKC_PHOSPHO_SITE | |
| | | | | 325-327; | |
| | | | | PKC_PHOSPHO_SITE | |
| | | | | 363-365; | |
| | | | | PKC_PHOSPHO_SITE | |
| | | | | 426-428; | |
| | | | | PKC_PHOSPHO_SITE | |
| | | | | 427-429; | |
| | | | | CK2_PHOSPHO_SITE | |
| | | | | 88-91; | |
| | | | | CK2_PHOSPHO_SITE | |
| | | | | 162-165; | |
| | | | | CK2_PHOSPHO_SITE | |
| | | | | 167-170; | |
| | | | | CK2_PHOSPHO_SITE | |
| | | | | 218-221; | |
| | | | | CK2_PHOSPHO_SITE | |
| | | | | 223-226; | |
| | | | | CK2_PHOSPHO_SITE | |
| | | | | 253-256; | |
| | | | | CK2_PHOSPHO_SITE | |
| | | | | 335-338; | |
| | | | | CK2_PHOSPHO_SITE | |
| | | | | 448-451; | |
| | | | | TYR_PHOSPHO_SITE | |
| | | | | 429-436; | |
| | | | | MYRISTYL 85-90; | |
| | | | | MYRISTYL | |
| | | | | 89-94; | |
| | | | | MYRISTYL 414-419; | |
| | | | | MYRISTYL | |
| | | | | 422-427; | |
| DEX0488_{—} | N | 0 - | 20-36, 1.167; | ASN_GLYCOSYLATION | |
| 029.aa.1 | | o1-110; | 67-77, 1.156; | 47-50; | |
| | | | 4-16, 1.142; | CK2_PHOSPHO_SITE | |
| | | | 79-95, 1.133, | 84-87; | |
| | | | 102-107 | MYRISTYL 52-57; | |
| | | | 1.127; | AMIDATION | |
| | | | | 55-58; | |
| DEX0488_{—} | N | 0 - | | ASN_GLYCOSYLATION | |
| 029.orf.1 | | o1-113; | | 38-41; | |
| | | | | ASN_GLYCOSYLATION | |
| | | | | 50-53; | |
| | | | | PKC_PHOSPHO_SITE | |
| | | | | 15-17; | |
| | | | | PKC_PHOSPHO_SITE | |
| | | | | 40-42; | |
| | | | | PKC_PHOSPHO_SITE | |
| | | | | 42-44; | |
| | | | | CK2_PHOSPHO_SITE | |
| | | | | 9-12; | |
| | | | | CK2_PHOSPHO_SITE | |
| | | | | 87-90; | |
| | | | | MYRISTYL 10-15; | |
| | | | | MYRISTYL | |
| | | | | 33-38; | |
| | | | | MYRISTYL 55-60; | |
| | | | | AMIDATION | |
| | | | | 24-27; | |
| | | | | AMIDATION 58-61; | |
| DEX0488_{—} | N | 0 - | 125-132, | ASN_GLYCOSYLATION | Gal-bind_lectin 4-135; |
| 030.aa.1 | | o1-135; | 1.159; | 55-58; | GLECT 3-135; |
| | | | 85-104, 1.118; | ASN_GLYCOSYLATION | GALAPTIN 68-88; |
| | | | 19-29, 1.115, | 65-68; | SUI1_1 122-129; |
| | | | 106-122, | CAMP_PHOSPHO_{—} | |
| | | | 1.098; | SITE 73-76; | |
| | | | 44-50, 1.08; | PKC_PHOSPHO_SITE | |
| | | | 6-12, 1.078; | 29-31; | |
| | | | 34-40, 1.07; | PKC_PHOSPHO_SITE | |
| | | | | 89-91; | |
| | | | | CK2_PHOSPHO_SITE | |
| | | | | 41-44; | |
| | | | | MYRISTYL 3-8; | |
| | | | | MYRISTYL 4-9; | |
| | | | | MYRISTYL 66-71; | |
| | | | | AMIDATION | |
| | | | | 12-15; | |
| DEX0488_{—} | N | 0 - | 1485-1504, | ASN_GLYCOSYLATION | PRICHEXTENSN 1143-1155; |
| 031.aa.1 | | o1-1590; | 1.254; | 1353-1356; | PRICHEXTENSN |
| | | | 15-29, 1.227; | ASN_GLYCOSYLATION | 1159-1175; |
| | | | 1353-1370, | 1564-1567; | PRICHEXTENSN 1188-1209; |
| | | | 1.22; | ASN_GLYCOSYLATION | PRICHEXTENSN |
| | | | 1375-1391, | 1580-1583; | 1265-1290; |
| | | | 1.192; | CAMP_PHOSPHO_{—} | FNTYPEIII 70-79; |
| | | | 56-96, 1.188; | SITE 48-51; | FNTYPEIII 209-227; |
| | | | 1540-1551, | CAMP_PHOSPHO_{—} | FNTYPEIII 227-241; |
| | | | 1.187; | SITE 790-793; | fn3 56-143; fn3 |
| | | | 1445-1452, | CAMP_PHOSPHO_{—} | 155-243; fn3 1347-1434; |
| | | | 1.181; | SITE 1139-1142; | FN3 56-140; |
| | | | 1122-1140, | CAMP_PHOSPHO_{—} | FN3 156-240; FN3 |
| | | | 1.163; | SITE 1172-1175; | 1348-1431; |
| | | | 1300-1310, | CAMP_PHOSPHO_{—} | SER_TICH 467-569, |
| | | | 1.161; | SITE 1177-1180; | THR_RICH 1141-1208; |
| | | | 1567-1587, | PKC_PHOSPHO_SITE | |
| | | | 1.16; | 46-48; | |
| | | | 680-697, 1.16; | PKC_PHOSPHO_SITE | |
| | | | 923-932, | 63-65; | |
| | | | 1.142; | PKC_PHOSPHO_SITE | |
| | | | 1430-1441, | 94-96; | |
| | | | 1.137; | PKC_PHOSPHO_SITE | |
| | | | 367-380, | 234-236; | |
| | | | 1.132; | PKC_PHOSPHO_SITE | |
| | | | 1523-1530, | 253-255; | |
| | | | 1.126; | PKC_PHOSPHO_SITE | |
| | | | 169-180, | 277-279; | |
| | | | 1.126; | PKC_PHOSPHO_SITE | |
| | | | 1315-1335, | 361-363; | |
| | | | 1.125; | PKC_PHOSPHO_SITE | |
| | | | 1401-1411, | 426-428; | |
| | | | 1.125; | PKC_PHOSPHO_SITE | |
| | | | 189-202, | 522-524; | |
| | | | 1.124; | PKC_PHOSPHO_SITE | |
| | | | 37-44, 1.123; | 568-570; | |
| | | | 123-134, 1.12; | PKC_PHOSPHO_SITE | |
| | | | 1090-1109, | 603-605; | |
| | | | 1.119; | PKC_PHOSPHO_SITE | |
| | | | 1470-1482, | 693-695; | |
| | | | 1.118; | PKC_PHOSPHO_SITE | |
| | | | 113-121, | 760-762; | |
| | | | 1.116; | PKC_PHOSPHO_SITE | |
| | | | 1419-1425, | 768-770; | |
| | | | 1.115; | PKC_PHOSPHO_SITE | |
| | | | 560-572, | 855-857; | |
| | | | 1.112; | PKC_PHOSPHO_SITE | |
| | | | 609-621, | 931-933; | |
| | | | 1.111; | PKC_PHOSPHO_SITE | |
| | | | 973-982, 1.11; | 945-947; | |
| | | | 522-537, | PKC_PHOSPHO_SITE | |
| | | | 1.108; | 962-964; | |
| | | | 450-492, | PKC_PHOSPHO_SITE | |
| | | | 1.107; | 980-982; | |
| | | | 1052-1066, | PKC_PHOSPHO_SITE | |
| | | | 1.107; | 995-997; | |
| | | | 240-251, | PKC_PHOSPHO_SITE | |
| | | | 1.105; | 1017-1019; | |
| | | | 1029-1035, | PKC_PHOSPHO_SITE | |
| | | | 1.105; | 1163-1165; | |
| | | | 1198-1207, | PKC_PHOSPHO_SITE | |
| | | | 1.104; | 1170-1172; | |
| | | | 800-815, | PKC_PHOSPHO_SITE | |
| | | | 1.103; | 1171-1173; | |
| | | | 428-434, | PKC_PHOSPHO_SITE | |
| | | | 1.102; | 1175-1177; | |
| | | | 274-292, | PKC_PHOSPHO_SITE | |
| | | | 1.101; | 1176-1178; | |
| | | | 215-221, 1.1; | PKC_PHOSPHO_SITE | |
| | | | 299-308, | 1182-1184; | |
| | | | 1.095; | PKC_PHOSPHO_SITE | |
| | | | 772-789, | 1186-1188; | |
| | | | 1.094; | PKC_PHOSPHO_SITE | |
| | | | 1241-1254, | 1194-1196; | |
| | | | 1.091; | PKC_PHOSPHO_SITE | |
| | | | 1342-1349, | 1261-1263; | |
| | | | 1.089; | PKC_PHOSPHO_SITE | |
| | | | 884-894, | 1276-1278; | |
| | | | 1.088; | PKC_PHOSPHO_SITE | |
| | | | 638-670, | 1495-1497; | |
| | | | 1.087; | PKC_PHOSPHO_SITE | |
| | | | 1225-1231, | 1540-1542; | |
| | | | 1.083; | CK2_PHOSPHO_SITE | |
| | | | 946-968, | 7-10; | |
| | | | 1.078; | CK2_PHOSPHO_SITE | |
| | | | 224-231, | 51-54; | |
| | | | 1.074; | CK2_PHOSPHO_SITE | |
| | | | 1458-1468, | 75-78; | |
| | | | 1.072; | CK2_PHOSPHO_SITE | |
| | | | 899-906, 1.07; | 125-128; | |
| | | | 406-421, | CK2_PHOSPHO_SITE | |
| | | | 1.068; | 134-137; | |
| | | | 826-832, | CK2_PHOSPHO_SITE | |
| | | | 1.068; | 157-160; | |
| | | | 735-751, | CK2_PHOSPHO_SITE | |
| | | | 1.063; | 254-257; | |
| | | | 395-403, | CK2_PHOSPHO_SITE | |
| | | | 1.058; | 337-340; | |
| | | | 204-210, | CK2 PHOSPHO SITE | |
| | | | 1.056; | 344-347; | |
| | | | 508-520, | CK2_PHOSPHO_SITE | |
| | | | 1.054; | 351-354; | |
| | | | 1276-1283, | CK2_PHOSPHO_SITE | |
| | | | 1.051; | 434-437; | |
| | | | 143-149, 1.05; | CK2_PHOSPHO_SITE | |
| | | | 318-323, | 443-446; | |
| | | | 1.037; | CK2_PHOSPHO_SITE | |
| | | | 848-854, | 580-583; | |
| | | | 1.033; | CK2_PHOSPHO_SITE | |
| | | | 712-719, | 584-587; | |
| | | | 1.032; | CK2_PHOSPHO_SITE | |
| | | | 382-388, | 659-662; | |
| | | | 1.029; | CK2_PHOSPHO_SITE | |
| | | | 601-607, | 728-731; | |
| | | | 1.029; | CK2_PHOSPHO_SITE | |
| | | | 328-334, | 752-755; | |
| | | | 1.022; | CK2_PHOSPHO_SITE | |
| | | | 1156-1161, | 847-850; | |
| | | | 1.002; | CK2_PHOSPHO_SITE | |
| | | | | 874-877; | |
| | | | | CK2_PHOSPHO_SITE | |
| | | | | 880-883; | |
| | | | | CK2_PHOSPHO_SITE | |
| | | | | 931-934; | |
| | | | | CK2_PHOSPHO_SITE | |
| | | | | 1089-1092; | |
| | | | | CK2_PHOSPHO_SITE | |
| | | | | 1236-1239; | |
| | | | | CK2_PHOSPHO_SITE | |
| | | | | 1266-1269; | |
| | | | | CK2_PHOSPHO_SITE | |
| | | | | 1288-1291; | |
| | | | | CK2_PHOSPHO_SITE | |
| | | | | 1319-1322; | |
| | | | | CK2_PHOSPHO_SITE | |
| | | | | 1331-1334; | |
| | | | | CK2_PHOSPHO_SITE | |
| | | | | 1374-1377; | |
| | | | | CK2_PHOSPHO_SITE | |
| | | | | 1388-1391; | |
| | | | | CK2_PHOSPHO_SITE | |
| | | | | 1441-1444; | |
| | | | | CK2_PHOSPHO_SITE | |
| | | | | 1469-1472; | |
| | | | | CK2_PHOSPHO_SITE | |
| | | | | 1512-1515; | |
| | | | | CK2_PHOSPHO_SITE | |
| | | | | 1529-1532; | |
| | | | | CK2_PHOSPHO_SITE | |
| | | | | 1560-1563; | |
| | | | | TYR_PHOSPHO_SITE | |
| | | | | 17-24; | |
| | | | | MYRISTYL 220-225; | |
| | | | | MYRISTYL | |
| | | | | 407-412; | |
| | | | | MYRISTYL 486-491; | |
| | | | | MYRISTYL | |
| | | | | 539-544; | |
| | | | | MYRISTYL 576-581; | |
| | | | | MYRISTYL | |
| | | | | 593-598; | |
| | | | | MYRISTYL 858-863; | |
| | | | | MYRISTYL | |
| | | | | 936-941; | |
| | | | | MYRISTYL | |
| | | | | 1061-1066; | |
| | | | | MYRISTYL | |
| | | | | 1113-1118; | |
| | | | | MYRISTYL | |
| | | | | 1224-1229; | |
| | | | | MYRISTYL | |
| | | | | 1284-1289; | |
| | | | | MYRISTYL | |
| | | | | 1489-1494; | |
| | | | | MYRISTYL | |
| | | | | 1533-1538; | |
| | | | | AMIDATION | |
| | | | | 1297-1300; | |
| DEX0488_{—} | N | 0- | | ASN_GLYCOSYLATION | FNTYPEIII 69-78; |
| 031.orf.1 | | o1-1108; | | 13-16; | FNTYPEIII 287-297; |
| | | | | ASN_GLYCOSYLATION | FNTYPEIII 311-329; |
| | | | | 47-50; | FNTYPEIII 329-343; |
| | | | | CAMP_PHOSPHO_{—} | fn3 56-139; fn3 |
| | | | | SITE 150-153; | 158-245; fn3 257-345; |
| | | | | CAMP_PHOSPHO_{—} | FN3 56-139; |
| | | | | SITE 892-895; | FN3 158-242; FN3 |
| | | | | PKC_PHOSPHO_SITE | 258-342; SER_RICH |
| | | | | 51-53; | 569-671; |
| | | | | PKC_PHOSPHO_SITE | |
| | | | | 85-87; | |
| | | | | PKC_PHOSPHO_SITE | |
| | | | | 99-101; | |
| | | | | PKC_PHOSPHO_SITE | |
| | | | | 148-150; | |
| | | | | PKC_PHOSPHO_SITE | |
| | | | | 165-167; | |
| | | | | PKC_PHOSPHO_SITE | |
| | | | | 196-198; | |
| | | | | PKC_PHOSPHO_SITE | |
| | | | | 336-338; | |
| | | | | PKC_PHOSPHO_SITE | |
| | | | | 355-357; | |
| | | | | PKC_PHOSPHO_SITE | |
| | | | | 379-381; | |
| | | | | PKC_PHOSPHO_SITE | |
| | | | | 463-465; | |
| | | | | PKC_PHOSPHO_SITE | |
| | | | | 528-530; | |
| | | | | PKC_PHOSPHO_SITE | |
| | | | | 624-626; | |
| | | | | PKC_PHOSPHO_SITE | |
| | | | | 670-672; | |
| | | | | PKC_PHOSPHO_SITE | |
| | | | | 705-707; | |
| | | | | PKC_PHOSPHO_SITE | |
| | | | | 795-797; | |
| | | | | PKC_PHOSPHO_SITE | |
| | | | | 862-864; | |
| | | | | PKC_PHOSPHO_SITE | |
| | | | | 870-872; | |
| | | | | PKC_PHOSPHO_SITE | |
| | | | | 957-959; | |
| | | | | PKC_PHOSPHO_SITE | |
| | | | | 1033-1035; | |
| | | | | PKC_PHOSPHO_SITE | |
| | | | | 1047-1049; | |
| | | | | PKC_PHOSPHO_SITE | |
| | | | | 1064-1066; | |
| | | | | CK2_PHOSPHO_SITE | |
| | | | | 49-52; | |
| | | | | CK2_PHOSPHO_SITE | |
| | | | | 51-54; | |
| | | | | CK2_PHOSPHO_SITE | |
| | | | | 66-69; | |
| | | | | CK2_PHOSPHO_SITE | |
| | | | | 109-112; | |
| | | | | CK2_PHOSPHO_SITE | |
| | | | | 153-156; | |
| | | | | CK2_PHOSPHO_SITE | |
| | | | | 177-180; | |
| | | | | CK2_PHOSPHO_SITE | |
| | | | | 227-230; | |
| | | | | CK2_PHOSPHO_SITE | |
| | | | | 236-239; | |
| | | | | CK2_PHOSPHO_SITE | |
| | | | | 259-262; | |
| | | | | CK2_PHOSPHO_SITE | |
| | | | | 356-359; | |
| | | | | CK2_PHOSPHO_SITE | |
| | | | | 439-442; | |
| | | | | CK2_PHOSPHO_SITE | |
| | | | | 446-449; | |
| | | | | CK2_PHOSPHO_SITE | |
| | | | | 453-456; | |
| | | | | CK2_PHOSPHO_SITE | |
| | | | | 536-539; | |
| | | | | CK2_PHOSPHO_SITE | |
| | | | | 545-548; | |
| | | | | CK2_PHOSPHO_SITE | |
| | | | | 682-685; | |
| | | | | CK2_PHOSPHO_SITE | |
| | | | | 686-689; | |
| | | | | CK2_PHOSPHO_SITE | |
| | | | | 761-764; | |
| | | | | CK2_PHOSPHO_SITE | |
| | | | | 830-833; | |
| | | | | CK2_PHOSPHO_SITE | |
| | | | | 854-857; | |
| | | | | CK2_PHOSPHO_SITE | |
| | | | | 949-952; | |
| | | | | CK2_PHOSPHO_SITE | |
| | | | | 976-979; | |
| | | | | CK2_PHOSPHO_SITE | |
| | | | | 982-985; | |
| | | | | CK2_PHOSPHO_SITE | |
| | | | | 1033-1036; | |
| | | | | TYR_PHOSPHO_SITE | |
| | | | | 119-126; | |
| | | | | MYRISTYL 322-327; | |
| | | | | MYRISTYL | |
| | | | | 509-514; | |
| | | | | MYRISTYL 588-593; | |
| | | | | MYRISTYL | |
| | | | | 641-646; | |
| | | | | MYRISTYL 678-683; | |
| | | | | MYRISTYL | |
| | | | | 695-700; | |
| | | | | MYRISTYL 960-965; | |
| | | | | MYRISTYL | |
| | | | | 1038-1043; | |
| | | | | AMIDATION 99-102; | |
| DEX0488_{—} | Y | 2 - | 4-28, 1.376; | MYRISTYL 6-11; | |
| 032.aa.1 | | o1-4; | 38-61, 1.191; | MYRISTYL | |
| | | tm5-27; | | 82-87; | |
| | | i28-39; tm40-62; | | MYRISTYL 86-91; | |
| | | o63-103; | | | |
| DEX0488_{—} | Y | 1 - | 14-32, 1.161; | ASN_GLYCOSYLATION | |
| 033.aa.1 | | o1-9; | 53-60, 1.134; | 39-42; | |
| | | tm10-32; | 87-95, 1.132; | PKC_PHOSPHO_SITE | |
| | | i33-151; | 63-76, 1.129; | 141-143; | |
| | | | 43-49, 1.113; | PKC_PHOSPHO_SITE | |
| | | | 138-145, | 144-146; | |
| | | | 1.111; | MYRISTYL 37-42; | |
| | | | 107-118, | MYRISTYL | |
| | | | 1.083; 6-12, | 138-143; | |
| | | | 1.081; | | |
| | | | 121-127, | | |
| | | | 1.071; | | |
| DEX0488_{—} | N | 0 - | 240-250, | ASN_GLYCOSYLATION | tRNA_bind 193-289; |
| 033.aa.2 | | o1-351; | 1.276; | 109-112; | TRBD 187-291; |
| | | | 223-236, | PKC_PHOSPHO_SITE | |
| | | | 1.186; | 13-15; | |
| | | | 92-102, 1.149; | PKC PHOSPHO SITE | |
| | | | 260-268, | 38-40; | |
| | | | 1.142; | PKC_PHOSPHO_SITE | |
| | | | 123-130, | 45-47; | |
| | | | 1.134; 4-22, | PKC_PHOSPHO_SITE | |
| | | | 1.133; | 341-343; | |
| | | | 287-295, | PKC_PHOSPHO_SITE | |
| | | | 1.132; | 344-346; | |
| | | | 133-146, | CK2_PHOSPHO_SITE | |
| | | | 1.129; | 45-48; | |
| | | | 67-85, 1.114; | CK2_PHOSPHO_SITE | |
| | | | 113-119, | 55-58; | |
| | | | 1.113; | CK2_PHOSPHO_SITE | |
| | | | 184-204, | 181-184; | |
| | | | 1.112; | CK2_PHOSPHO_SITE | |
| | | | 338-345, | 189-192; | |
| | | | 1.111; | MYRISTYL 25-30; | |
| | | | 207-215, | MYRISTYL | |
| | | | 1.106; | 63-68; | |
| | | | 156-167, | MYRISTYL 107-112; | |
| | | | 1.097; | MYRISTYL | |
| | | | 24-31, 1.097; | 261-266; | |
| | | | 34-44, 1.087; | MYRISTYL 283-288; | |
| | | | 307-318, | MYRISTYL | |
| | | | 1.083; | 338-343; | |
| | | | 274-284, | | |
| | | | 1.077; | | |
| | | | 321-327, | | |
| | | | 1.071; | | |
| DEX0488_{—} | N | 0 - | 190-200, | ASN_GLYCOSYLATION | tRNA_bind 143-239; |
| 033.orf.2 | | o1-301; | 1.276; | 8-11; | TRBD 137-241; |
| | | | 173-186, | ASN_GLYCOSYLATION | |
| | | | 1.186; 6-52, | 59-62; | |
| | | | 1.149; | PKC_PHOSPHO_SITE | |
| | | | 210-218, | 10-12; | |
| | | | 1.142; | PKC_PHOSPHO_SITE | |
| | | | 73-80, 1.134; | 291-293; | |
| | | | 237-245, | PKC_PHOSPHO_SITE | |
| | | | 1.132; | 294-296; | |
| | | | 83-96, 1.129; | CK2_PHOSPHO_SITE | |
| | | | 63-69, 1.113; | 131-134; | |
| | | | 134-154, | CK2_PHOSPHO_SITE | |
| | | | 1.112; | 139-142; | |
| | | | 288-295, | MYRISTYL 38-43; | |
| | | | 1.111; | MYRISTYL | |
| | | | 157-165, | 57-62; | |
| | | | 1.106; | MYRISTYL 211-216; | |
| | | | 106-117, | MYRISTYL | |
| | | | 1.097; | 233-238; | |
| | | | 257-268, | MYRISTYL 288-293; | |
| | | | 1.083; | | |
| | | | 224-234, | | |
| | | | 1.077; | | |
| | | | 271-277, | | |
| | | | 1.071; | | |
| DEX0488_{—} | Y | 1 - | 115-127, | ASN_GLYCOSYLATION | sp_O14788_TN11_HUMAN |
| 034.aa.1 | | i1-11; | 1.181; | 53-56; | 48-195; |
| | | tm12-34; | 95-106, 1.139; | ASN_GLYCOSYLATION | TNECROSISFCT 153-176; |
| | | o35-199; | 4-29, 1.119; | 80-83; | TNECROSISFCT |
| | | | 172-183, | PKC PHOSPHO SITE | 183-194; TNF 45-195; |
| | | | 1.107; | 9-11; | TNF 46-195; |
| | | | 59-69, 1.103; | PKC_PHOSPHO_SITE | TNF_2 48-195; |
| | | | 152-162, | 61-63; | |
| | | | 1.097; | PKC_PHOSPHO_SITE | |
| | | | 43-52, 1.093; | 128-130; | |
| | | | 189-196, | PKC_PHOSPHO_SITE | |
| | | | 1.085; | 142-144; | |
| | | | 129-136, | CK2_PHOSPHO_SITE | |
| | | | 1.072; | 32-35; | |
| | | | 86-93, 1.054; | CK2_PHOSPHO_SITE | |
| | | | 31-37, 1.038; | 40-43; | |
| | | | | CK2_PHOSPHO_SITE | |
| | | | | 109-112; | |
| | | | | CK2_PHOSPHO_SITE | |
| | | | | 167-170; | |
| | | | | CK2_PHOSPHO_SITE | |
| | | | | 179-182; | |
| DEX0488_{—} | N | 1 - | 259-269, 1.23; | CAMP_PHOSPHO_{—} | sp_P53351_SNK_MOUSE |
| 035.aa.1 | | il-221; | 213-250, | SITE 312-315; | 82-209; |
| | | tm222-244; | 1.212; | CAMP_PHOSPHO_{—} | sp_P53351_SNK_MOUSE |
| | | o245-761; | 130-149, | SITE 479-482; | 283-410; |
| | | | 1.186; | PKC_PHOSPHO_SITE | POLO_box 586-649; |
| | | | 419-435, | 14-16; | POLO_box 682-753; |
| | | | 1.185; | PKC_PHOSPHO_SITE | pkinase 82-410; |
| | | | 276-287, 1.18; | 30-32; | S_TKc 82-410; |
| | | | 155-165, | PKC_PHOSPHO_SITE | TyrKc 82-410; |
| | | | 1.177; | 78-80; | POLO_BOX_1 586-649; |
| | | | 639-653, | PKC_PHOSPHO_SITE | POLO_BOX_2 |
| | | | 1.158; | 163-165; | 682-753; HIS_RICH |
| | | | 674-682, | PKC_PHOSPHO_SITE | 57-64; |
| | | | 1.153; | 213-215; | PROTEIN_KINASE_DOM |
| | | | 611-635, | PKC_PHOSPHO_SITE | 82-410; |
| | | | 1.149; | 364-366; | PROTEIN_KINASE_ATP |
| | | | 336-354, | PKC_PHOSPHO_SITE | 88-120; |
| | | | 1.147; | 587-589; | |
| | | | 168-206, | PKC_PHOSPHO_SITE | |
| | | | 1.142; | 684-686; | |
| | | | 592-606, | PKC_PHOSPHO_SITE | |
| | | | 1.142; | 730-732; | |
| | | | 316-330, | CK2_PHOSPHO_SITE | |
| | | | 1.139; | 65-68; | |
| | | | 548-558, | CK2_PHOSPHO_SITE | |
| | | | 1.131; | 178-181; | |
| | | | 107-121, | CK2_PHOSPHO_SITE | |
| | | | 1.129; | 260-263; | |
| | | | 83-90, 1.126; | CK2_PHOSPHO_SITE | |
| | | | 698-714, | 400-403; | |
| | | | 1.118; | CK2_PHOSPHO_SITE | |
| | | | 44-67, 1.115; | 426-429; | |
| | | | 716-721, | CK2_PHOSPHO_SITE | |
| | | | 1.105; | 465-468; | |
| | | | 376-390, | CK2_PHOSPHO_SITE | |
| | | | 1.104; | 492-495; | |
| | | | 526-541, | CK2_PHOSPHO_SITE | |
| | | | 1.103; | 534-537; | |
| | | | 565-572, | CK2_PHOSPHO_SITE | |
| | | | 1.096; | 546-549; | |
| | | | 665-671 | CK2_PHOSPHO_SITE | |
| | | | 1.091; | 667-670; | |
| | | | 733-740, | CK2_PHOSPHO_SITE | |
| | | | 1.091; | 712-715; | |
| | | | 70-76, 1.084; | TYR_PHOSPHO_SITE | |
| | | | 753-758, | 366-373; | |
| | | | 1.082; | TYR_PHOSPHO_SITE | |
| | | | 442-449, | 466-472; | |
| | | | 1.075; | MYRISTYL 238-243; | |
| | | | 574-587, | MYRISTYL | |
| | | | 1.075; 4-13, | 527-532; | |
| | | | 1.072; | MYRISTYL 530-535; | |
| | | | 297-309, | MYRISTYL | |
| | | | 1.067; | 557-562; | |
| | | | 471-477, | MYRISTYL 602-607; | |
| | | | 1.062; | MYRISTYL | |
| | | | 406-414, | 608-613; | |
| | | | 1.061; | AMIDATION 78-81; | |
| | | | 364-370, | AMIDATION | |
| | | | 1.055; | 449-452; | |
| | | | 497-506, | LEUCINE_ZIPPER | |
| | | | 1.043; | 226-247; | |
| DEX0488_{—} | N | 0 - | 200-230, | CAMP_PHOSPHO_{—} | sp_Q9R012_SNK_RAT |
| 035.aa.2 | | o1-752; | 1.211; | SITE 303-306; | 82-165; |
| | | | 130-149, | CAMP_PHOSPHO_{—} | sp_P53351_SNK_MOUSE |
| | | | 1.186; | SITE 470-473; | 234-401; |
| | | | 410-426, | PKC_PHOSPHO_SITE | TYRKINASE 262-280; |
| | | | 1.185; | 14-16; | TYRKINASE 328-350; |
| | | | 155-164, | PKC_PHOSPHO_SITE | POLO_box 577-640; |
| | | | 1.177; | 30-32; | POLO_box 673-744; |
| | | | 630-644, | PKC_PHOSPHO_SITE | pkinase 82-401; |
| | | | 1.158; | 78-80; | S_TKc 82-401; |
| | | | 665-673, | PKC_PHOSPHO_SITE | TyrKc 82-401; |
| | | | 1.153; | 163-165; | POLO_BOX_1 577-640; |
| | | | 602-626, | PKC_PHOSPHO_SITE | POLO_BOX_2 |
| | | | 1.149; | 200-202; | 673-744; HIS_RICH |
| | | | 327-345, | PKC_PHOSPHO_SITE | 57-64; |
| | | | 1.147; | 209-211; | PROTEIN_KINASE_DOM |
| | | | 583-597, | PKC_PHOSPHO_SITE | 82-401; |
| | | | 1.142; | 355-357; | PROTEIN_KINASE_ATP |
| | | | 234-273, | PKC_PHOSPHO_SITE | 88-120; |
| | | | 1.142; | 578-580; | PROTEIN_KINASE_ST |
| | | | 307-321, | PKC_PHOSPHO_SITE | 268-280; |
| | | | 1.139; | 675-677; | |
| | | | 539-549, | PKC_PHOSPHO_SITE | |
| | | | 1.131; | 721-723; | |
| | | | 107-121, | CK2_PHOSPHO_SITE | |
| | | | 1.129; | 65-68; | |
| | | | 83-90, 1.126; | CK2_PHOSPHO_SITE | |
| | | | 689-705, | 229-232; | |
| | | | 1.118; | CK2_PHOSPHO_SITE | |
| | | | 168-188, | 245-248; | |
| | | | 1.117; | CK2_PHOSPHO_SITE | |
| | | | 44-67, 1.115; | 391-394; | |
| | | | 707-712, | CK2_PHOSPHO_SITE | |
| | | | 1.105; | 417-420; | |
| | | | 367-381, | CK2_PHOSPHO_SITE | |
| | | | 1.104; | 456-459; | |
| | | | 517-532, | CK2_PHOSPHO_SITE | |
| | | | 1.103; | 483-486; | |
| | | | 556-563, | CK2 PHOSPHO SITE | |
| | | | 1.096; | 525-528; | |
| | | | 656-662, | CK2_PHOSPHO_SITE | |
| | | | 1.091; | 537-540; | |
| | | | 724-731, | CK2_PHOSPHO_SITE | |
| | | | 1.091; | 658-661; | |
| | | | 70-76, 1.084; | CK2_PHOSPHO_SITE | |
| | | | 744-749, | 703-706; | |
| | | | 1.082; | TYR_PHOSPHO_SITE | |
| | | | 433-440, | 357-364; | |
| | | | 1.075; | TYR_PHOSPHO_SITE | |
| | | | 565-578, | 457-463; | |
| | | | 1.075; | MYRISTYL 196-201; | |
| | | | 190-198, | MYRISTYL | |
| | | | 1.074; 4-13, | 518-523; | |
| | | | 1.072; | MYRISTYL 521-526; | |
| | | | 288-300, | MYRISTYL | |
| | | | 1.067; | 548-553; | |
| | | | 462-468, | MYRISTYL 593-598; | |
| | | | 1.062; | MYRISTYL | |
| | | | 397-405, | 599-604; | |
| | | | 405, 1.061; | AMIDATION 78-81; | |
| | | | 355-361, | AMIDATION | |
| | | | 1.055; | 440-443; | |
| | | | 488-497, | | |
| | | | 1.043; | | |
| DEX0488_{—} | N | 0 - | 300-308, | PKC_PHOSPHO_SITE | sp_Q9UEW3_MRCO_HUMAN |
| 036.aa.1 | | o1-399; | 1.171; | 302-304; | 135-160; |
| | | | 334-345, | PKC_PHOSPHO_SITE | SPERACTRCPTR 301-317; |
| | | | 1.141; | 309-311; | SPERACTRCPTR |
| | | | 347-356, | CK2_PHOSPHO_SITE | 320-331; |
| | | | 1.104; | 109-112; | SPERACTRCPTR 335-345; |
| | | | 245-254, | CK2_PHOSPHO_SITE | SPERACTRCPTR |
| | | | 1.101; | 124-127; | 363-377; |
| | | | 362-369, | CK2_PHOSPHO_SITE | SPERACTRCPTR 386-398; |
| | | | 1.085; 9-26, | 136-139; | SRCR 305-398; |
| | | | 1.079; | CK2_PHOSPHO_SITE | Collagen 36-95; |
| | | | 181-197, | 157-160; | Collagen 102-161; |
| | | | 1.075; | CK2_PHOSPHO_SITE | Collagen 165-224; |
| | | | 314-319, | 229-232; | Collagen 234-293; |
| | | | 1.072; | CK2_PHOSPHO_SITE | SR 303-398; |
| | | | 384-390, | 283-286; | GLY_RICH 33-297; |
| | | | 1.068; | CK2_PHOSPHO_SITE | SRCR_2 303-398; |
| | | | 374-379, | 324-327 | COLLAGEN_REP 33-298; |
| | | | 1.057; | CK2_PHOSPHO_SITE | |
| | | | 166-173, 1.04; | 388-391; | |
| | | | 259-266, | TYR_PHOSPHO_SITE | |
| | | | 1.029; | 311-318; | |
| | | | 323-328, | MYRISTYL 57-62; | |
| | | | 1.008; | MYRISTYL | |
| | | | | 132-137; | |
| | | | | MYRISTYL 153-158; | |
| | | | | MYRISTYL | |
| | | | | 219-224; | |
| | | | | MYRISTYL 225-230; | |
| | | | | MYRISTYL | |
| | | | | 279-284; | |
| | | | | MYRISTYL 320-325; | |
| | | | | MYRISTYL | |
| | | | | 354-359; | |
| | | | | MYRISTYL 369-374; | |
| | | | | MYRISTYL | |
| | | | | 394-399; | |
| | | | | AMIDATION | |
| | | | | 239-242; | |
| DEX0488_{—} | N | 1 - | 43-69, 1.266; | ASN_GLYCOSYLATION | sp_Q9UEW3_MRCO_HUMAN |
| 036.aa.2 | | i1-45; tm46-68; | 334-342, | 43-46; | 169-194; |
| | | o69-433; | 1.171; | PKC_PHOSPHO_SITE | SPERACTRCPTR 335-351; |
| | | | 368-376, | 336-338; | SPERACTRCPTR |
| | | | 1.141; | PKC_PHOSPHO_SITE | 354-365; |
| | | | 381-388, | 343-345; | SPERACTRCPTR 369-379; |
| | | | 1.104; | CK2_PHOSPHO_SITE | SPERACTRCPTR |
| | | | 281-288, | 143-146; | 397-411; |
| | | | 1.101; | CK2_PHOSPHO_SITE | SPERACTRCPTR 420-432; |
| | | | 396-402, | 158-161; | SRCR 339-432; |
| | | | 1.085; | CK2_PHOSPHO_SITE | Collagen 70-129; |
| | | | 18-26, 1.079; | 170-173; | Collagen 136-195; |
| | | | 218-231, | CK2_PHOSPHO_SITE | Collagen 199-258; |
| | | | 1.075; | 191-194; | Collagen 268-327; |
| | | | 348-353, | CK2_PHOSPHO_SITE | SR 337-432; |
| | | | 1.072; | 263-266; | GLY_RICH 59-331; |
| | | | 30-36, 1.054; | CK2_PHOSPHO_SITE | SRCR_2 337-432; |
| | | | 200-206, 1.04; | 317-320; | COLLAGEN_REP 67-332; |
| | | | | CK2_PHOSPHO_SITE | |
| | | | | 358-361; | |
| | | | | CK2_PHOSPHO_SITE | |
| | | | | 422-425; | |
| | | | | TYR_PHOSPHO_SITE | |
| | | | | 345-352; | |
| | | | | MYRISTYL 41-46; | |
| | | | | MYRISTYL | |
| | | | | 91-96; | |
| | | | | MYRISTYL 166-171; | |
| | | | | MYRISTYL | |
| | | | | 187-192; | |
| | | | | MYRISTYL 253-258; | |
| | | | | MYRISTYL | |
| | | | | 259-264; | |
| | | | | MYRISTYL 313-318; | |
| | | | | MYRISTYL | |
| | | | | 354-359; | |
| | | | | MYRISTYL 388-393; | |
| | | | | MYRISTYL | |
| | | | | 403-408; | |
| | | | | MYRISTYL 428-433; | |
| | | | | AMIDATION | |
| | | | | 273-276; | |

### Example 1b

### Sequence Alignment Support

[0466] Alignments between previously identified sequences and splice variant sequences are performed to confirm unique portions of splice variant nucleic acid and amino acid sequences. The alignments are done using the Needle program in the European Molecular Biology Open Software Suite (EMBOSS) version 2.2.0 available at emboss with the extension .org of the world wide web from EMBnet (embnet with the extension .org of the world wide web). Default settings are used unless otherwise noted. The Needle program in EMBOSS implements the Needleman-Wunsch algorithm. Needleman, S. B., Wunsch, C. D., J. Mol. Biol. 48:443-453 (1970).

[0467] It is well know to those skilled in the art that implication of alignment algorithms by various programs may result in minor changes in the generated output. These changes include but are not limited to: alignment scores (percent identity, similarity, and gap), display of nonaligned flanking sequence regions, and number assignment to residues. These minor changes in the output of an alignment do not alter the physical characteristics of the sequences or the differences between the sequences, e.g. regions of homology, insertions, or deletions.

### Example 1c

### RT-PCR Analysis

[0468] To detect the presence and tissue distribution of a particular splice variant Reverse Transcription-Polymerase Chain Reaction (RT-PCR) is performed using cDNA generated from a panel of tissue RNAs. See, e.g., Sambrook et al., Molecular Cloning: A Laboratory Manual, 2d ed., Cold Spring Harbor Laboratory Press (1989) and; Kawasaki E S et al., PNAS 85(15):5698 (1988). Total RNA is extracted from a variety of tissues and first strand cDNA is prepared with reverse transcriptase (RT). Each panel includes 23 cDNAs from five cancer types (lung, ovary, breast, colon, and prostate) and normal samples of testis, placenta and fetal brain. Each cancer set is composed of three cancer cDNAs from different donors and one normal pooled sample. Using a standard enzyme kit from BD Bioscience Clontech (Mountain View, Calif.), the target transcript is detected with sequence-specific primers designed to only amplify the particular splice variant. The PCR reaction is run on the GeneAmp PCR system 9700 (Applied Biosystem, Foster City, Calif.) thermocycler under optimal conditions. One of ordinary skill can design appropriate primers and determine optimal conditions. The amplified product is resolved on an agarose gel to detect a band of equivalent size to the predicted RT-PCR product. A band indicated the presence of the splice variant in a sample. The relation of the amplified product to the splice variant was subsequently confirmed by DNA sequencing.

[0469] After subcloning, all positively screened clones are sequence verified. The DNA sequence verification results show the splice variant contains the predicted sequence differences in comparison with the reference sequence.

[0470] Results for RT-PCR analysis include the sequence DEX ID, Lead Name, Cancer Tissue(s) the transcript was detected in, Normal Tissue(s) the transcript was detected in, the predicted length of the RT-PCR product, and the Confirmed Length of the RT-PCR product.

[0471] RT-PCR results confirm the presence SEQ ID NO: 1-100 in biologic samples and distinguish between related transcripts.

### Example 1d

### Secretion Assay

[0472] To determine if a protein encoded by a splice variant is secreted from cells a secretion assay is preformed. A pcDNA3.1 clone containing the gene transcript which encodes the variant protein is transfected into 293T cells using the Superfect transfection reagent (Qiagen, Valencia Calif.). Transfected cells are incubated for 28 hours before the media is collected and immediately spun down to remove any detached cells. The adherent cells are solubilized with lysis buffer (1% NP40, 10 mM sodium phosphate pH7.0, and 0.15 M NaCl). The lysed cells are collected and spun down and the supernatant extracted as cell lysate. Western immunoblot is carried out in the following manner: 15 μl of the cell lysate and media are run on 4-12% NuPage Bis-Tris gel (Invitrogen, Carlsbad Calif.), and blotted onto a PVDF membrane (Invitrogen, Carlsbad Calif.). The blot is incubated with a polyclonal primary antibody which binds to the variant protein (Imgenex, San Diego Calif.) and polyclonal goat anti-rabbit-peroxidase secondary antibody (Sigma-Aldrich, St. Louis Mo.). The blot is developed with the ECL Plus chemiluminescent detection reagent (Amersham BioSciences, Piscataway N.J.).

[0473] Secretion assay results are indicative of SEQ ID NO: 101-240 being a diagnostic marker and/or therapeutic target for cancer.

### Example 2a

### Gene Expression Analysis

Custom Microarray Experiment—Cancer

[0474] Tissue Specific Array and Multi-Cancer Array Experiments

[0475] Custom oligonucleotide microarrays were provided by Agilent Technologies, Inc. (Palo Alto, Calif.). The microarrays were fabricated by Agilent using their technology for the in-situ synthesis of 60 mer oligonucleotides (Hughes, et al. 2001, Nature Biotechnology 19:342-347). The 60 mer microarray probes were designed by Agilent, from nucleic acid sequences provided by diaDexus, using Agilent proprietary algorithms. Whenever possible two different 60 mers were designed for each nucleic acid of interest.

[0476] All Tissue Specific and Multi-Cancer microarray experiments were two-color experiments and were preformed using Agilent-recommended protocols and reagents. Briefly, each microarray was hybridized with cRNAs synthesized from polyA+ RNA, isolated from cancer and normal tissues or cell lines, and labeled with fluorescent dyes Cyanine3 (Cy3) or Cyanine5 (Cy5) (NEN Life Science Products, Inc., Boston, Mass.) using a linear amplification method (Agilent). In each experiment the experimental sample was RNA isolated from cancer tissue from a single individual or cell line and the reference sample was a pool of RNA isolated from normal tissues of the same organ as the cancerous tissue (i.e. normal ovarian tissue in experiments with ovarian cancer or cell line samples). Hybridizations were carried out at 60° C., overnight using Agilent in-situ hybridization buffer. Following washing, arrays were scanned with a GenePix 4000B Microarray Scanner (Axon Instruments, Inc., Union City, Calif.). Each array was scanned at two PMT voltages (600 v and 550 v). The resulting images were analyzed with GenePix Pro 3.0 Microarray Acquisition and Analysis Software (Axon). Unless otherwise noted, data reported is from images generated by scanning at PMT of 600 v.

[0477] Data normalization and expression profiling were done with Expressionist software from GeneData Inc. (South San Francisco, Calif./Basel, Switzerland). Nucleic acid sequence expression analysis was performed using only experiments that met certain quality criteria. The quality criteria that experiments must meet are a combination of evaluations performed by the Expressionist software and evaluations performed manually using raw and normalized data. To evaluate raw data quality, detection limits (the mean signal for a replicated negative control+2 Standard Deviations (SD)) for each channel were calculated. The detection limit is a measure of non-specific hybridization. Acceptable detection limits were defined for each dye (<80 for Cy5 and <150 for Cy3). Arrays with poor detection limits in one or both channels were not analyzed and the experiments were repeated. To evaluate normalized data quality, positive control elements included in the array were utilized. These array features should have a mean ratio of 1 (no differential expression). If these features have a mean ratio of greater than 1.5-fold up or down, the experiments were not analyzed further and were repeated. In addition to traditional scatter plots demonstrating the distribution of signal in each experiment, the Expressionist software also has minimum thresholding criteria that employ user defined parameters to identify quality data. These thresholds include two distinct quality measurements: 1) minimum area percentage, which is a measure of the integrity of each spot and 2) signal to noise ratio, which ensures that the signal being measured is significantly above any background (nonspecific) signal present. Only those features that met the threshold criteria were included in the filtering and analyses carried out by Expressionist. The thresholding settings employed require a minimum area percentage of 60% [(% pixels>background+2SD)−(% pixels saturated)], and a minimum signal to noise ratio of 2.0 in both channels. Using these criteria, very low expressors, saturated features and spots with abnormally high local background were not included in analysis.

[0478] Relative expression data was collected from Expressionist based on filtering and clustering analyses. Up-regulated nucleic acid sequences were identified using criteria for the percentage of experiments in which the nucleic acid sequence is up-regulated by at least 2-fold. For cell lines, up-regulated nucleic acid sequences were identified using criteria for the percentage of experiments in which the nucleic acid sequence is up-regulated by at least 1.8-fold. In general, up-regulation in ˜30% of samples tested was used as a cutoff for filtering.

[0479] Two microarray experiments were preformed for each normal and cancer tissue pair. The tissue specific Array Chip for each cancer tissue is a unique microarray specific to that tissue and cancer. The Multi-Cancer Array Chip is a universal microarray that was hybridized with samples from each of the cancers (ovarian, breast, colon, lung, and prostate). See the description below for the experiments specific to the different cancers.

[0480] UniDEX1 (UD1) Chip Experiment

[0481] Custom oligonucleotide microarrays were provided by Agilent Technologies, Inc. (Palo Alto, Calif.). The microarrays were fabricated by Agilent using their technology for the in-situ synthesis of 60 mer oligonucleotides (Hughes, et al. 2001, Nature Biotechnology 19:342-347). The 60 mer microarray probes were designed by Agilent, from nucleic acid sequences provided by diaDexus, using Agilent proprietary algorithms.

[0482] All UniDEX1 microarray experiments were two-color experiments and were preformed using Agilent-recommended protocols and reagents. Briefly, each microarray was hybridized with cRNAs synthesized from total RNA, isolated from cancer and normal tissues and labeled with fluorescent dyes Cyanine3 (Cy3) or Cyanine5 (Cy5) (NEN Life Science Products, Inc., Boston, Mass.) using a linear amplification method (Agilent). In each experiment the experimental sample was RNA isolated from cancer tissue or benign disease from a single individual and the reference sample was a pool of RNA isolated from normal tissues of the same organ as the cancerous or diseased tissue (i.e. normal ovarian tissue in experiments with ovarian cancer or ovarian diseases). Hybridizations were carried out at 60° C., overnight using Agilent in-situ hybridization buffer. Following washing, arrays were scanned with a GenePix 4000B Microarray Scanner (Axon Instruments, Inc., Union City, Calif.). Each array was scanned at two PMT voltages (600 v and 550 v). The resulting images were analyzed with GenePix Pro 3.0 Microarray Acquisition and Analysis Software (Axon). Unless otherwise noted, data reported is from images generated by scanning at PMT of 600 v.

[0483] Data normalization and expression profiling were done with Expressionist software from GeneData Inc. (South San Francisco, Calif./Basel, Switzerland). Nucleic acid sequence expression analysis was performed using only experiments that met certain quality criteria. Quality assessment was performed using the Refiner module of Expressionist and the Thresholding module of the Analyst component of the Expressionist software. In addition to traditional scatter plots demonstrating the distribution of signal in each experiment, the Expressionist software also has minimum thresholding criteria that employ user defined parameters to identify quality data. These thresholds include two distinct quality measurements: 1) maximum relative error, which is a measure of the integrity of each spot and 2) signal to noise ratio, which ensures that the signal being measured is significantly above any background (nonspecific) signal present. Only those features that met the threshold criteria were included in the filtering and analyses carried out by Expressionist. The thresholding settings employed require a maximum relative error of 1, and a minimum signal to noise ratio of 2.0 in both channels. Using these criteria, very low expressors, saturated features and spots with abnormally high local background were not included in analysis.

[0484] Relative expression data was collected from Expressionist based on filtering and clustering analyses. Up-regulated nucleic acid sequences were identified using criteria for the percentage of experiments in which the nucleic acid sequence is up-regulated by at least 1.8-fold In general, up-regulation in ˜30% of samples tested was used as a cutoff for filtering.

[0485] Each cancer or benign disease sample and the normal pool was hybridized on the UniDEX1 chip. See the description below for the experiments specific to the different cancers.

Microarray Experiments and Data Tables

[0486] Ovarian Cancer Chips

[0487] For ovarian cancer two different chip designs were evaluated with overlapping sets of a total of 19 samples, comparing the expression patterns of ovarian cancer derived total RNA to total RNA isolated from a pool of 9 normal ovarian tissues. For the Multi-Cancer Array Chip, all 19 samples (14 invasive carcinomas, 5 low malignant potential samples were analyzed and for the Ovarian Array Chip, a subset of 17 of these samples (13 invasive carcinomas, 4 low malignant potential samples) were assessed.

[0488] The results for the statistically significant up-regulated genes on the Ovarian Array Chip are shown in Table(s) 1-2. The results for the statistically significant up-regulated genes on the Multi-Cancer Array Chip are shown in Table(s) 3-4. The first two columns of each table contain information about the sequence itself (DEX ID, Oligo Name), the next columns show the results obtained for all (“ALL”) ovarian cancer samples, invasive carcinomas (“INV”) and low malignant potential (“LMP”) samples. ‘% up’ indicates the percentage of all experiments in which up-regulation of at least 2-fold was observed (n=19 for the Multi-Cancer Array Chip, n=17 for the Ovarian Array Chip), ‘% valid up’ indicates the percentage of experiments with valid expression values in which up-regulation of at least 2-fold was observed.

TABLE 1

| | | Ovr ALL | Ovr ALL | Ovr INV | Ovr INV | Ovr LMP | Ovr LMP |
|---|---|---|---|---|---|---|---|
| | Oligo | % up | % valid up | % up | % valid up | % up | % valid up |
| DEX ID | Name | n = 17 | n = 17 | n = 13 | n = 13 | n = 4 | n = 4 |
| DEX0488_004.nt.1 | 10666.01 | 11.8 | 13.3 | 0.0 | 0.0 | 50.0 | 66.7 |
| DEX0488_004.nt.1 | 10666.02 | 11.8 | 14.3 | 0.0 | 0.0 | 50.0 | 66.7 |
| DEX0488_005.nt.1 | 9744.01 | 58.8 | 58.8 | 69.2 | 69.2 | 25.0 | 25.0 |
| DEX0488_005.nt.1 | 9744.02 | 58.8 | 58.8 | 69.2 | 69.2 | 25.0 | 25.0 |
| DEX0488_011.nt.1 | 39927.01 | 70.6 | 70.6 | 76.9 | 76.9 | 50.0 | 50.0 |
| DEX0488_011.nt.1 | 39927.02 | 64.7 | 64.7 | 76.9 | 76.9 | 25.0 | 25.0 |
| DEX0488_012.nt.1 | 21187.01 | 17.6 | 20.0 | 23.1 | 27.3 | 0.0 | 0.0 |
| DEX0488_012.nt.1 | 21187.02 | 23.5 | 30.8 | 23.1 | 33.3 | 25.0 | 25.0 |
| DEX0488_021.nt.1 | 21187.01 | 17.6 | 20.0 | 23.1 | 27.3 | 0.0 | 0.0 |
| DEX0488_021.nt.1 | 21187.02 | 23.5 | 30.8 | 23.1 | 33.3 | 25.0 | 25.0 |
| DEX0488_021.nt.2 | 21187.01 | 17.6 | 20.0 | 23.1 | 27.3 | 0.0 | 0.0 |
| DEX0488_021.nt.2 | 21187.02 | 23.5 | 30.8 | 23.1 | 33.3 | 25.0 | 25.0 |
| DEX0488_022.nt.2 | 21553.01 | 0.0 | 0.0 | 0.0 | 0.0 | 0.0 | 0.0 |
| DEX0488_022.nt.2 | 21553.02 | 0.0 | 0.0 | 0.0 | 0.0 | 0.0 | 0.0 |
| DEX0488_022.nt.2 | 21577.01 | 17.6 | 20.0 | 15.4 | 16.7 | 25.0 | 33.3 |
| DEX0488_022.nt.2 | 21577.02 | 0.0 | 0.0 | 0.0 | 0.0 | 0.0 | 0.0 |
| DEX0488_022.nt.3 | 21553.01 | 0.0 | 0.0 | 0.0 | 0.0 | 0.0 | 0.0 |
| DEX0488_022.nt.3 | 21553.02 | 0.0 | 0.0 | 0.0 | 0.0 | 0.0 | 0.0 |
| DEX0488_022.nt.3 | 21577.01 | 17.6 | 20.0 | 15.4 | 16.7 | 25.0 | 33.3 |
| DEX0488_022.nt.3 | 21577.02 | 0.0 | 0.0 | 0.0 | 0.0 | 0.0 | 0.0 |
| DEX0488_022.nt.4 | 21553.01 | 0.0 | 0.0 | 0.0 | 0.0 | 0.0 | 0.0 |
| DEX0488_022.nt.4 | 21553.02 | 0.0 | 0.0 | 0.0 | 0.0 | 0.0 | 0.0 |
| DEX0488_022.nt.4 | 21577.01 | 17.6 | 20.0 | 15.4 | 16.7 | 25.0 | 33.3 |
| DEX0488_022.nt.4 | 21577.02 | 0.0 | 0.0 | 0.0 | 0.0 | 0.0 | 0.0 |
| DEX0488_022.nt.5 | 21553.01 | 0.0 | 0.0 | 0.0 | 0.0 | 0.0 | 0.0 |
| DEX0488_022.nt.5 | 21553.02 | 0.0 | 0.0 | 0.0 | 0.0 | 0.0 | 0.0 |
| DEX0488_022.nt.5 | 21577.01 | 17.6 | 20.0 | 15.4 | 16.7 | 25.0 | 33.3 |
| DEX0488_022.nt.5 | 21577.02 | 0.0 | 0.0 | 0.0 | 0.0 | 0.0 | 0.0 |
| DEX0488_024.nt.1 | 21553.01 | 0.0 | 0.0 | 0.0 | 0.0 | 0.0 | 0.0 |
| DEX0488_024.nt.1 | 21553.02 | 0.0 | 0.0 | 0.0 | 0.0 | 0.0 | 0.0 |
| DEX0488_024.nt.1 | 21577.01 | 17.6 | 20.0 | 15.4 | 16.7 | 25.0 | 33.3 |
| DEX0488_024.nt.1 | 21577.02 | 0.0 | 0.0 | 0.0 | 0.0 | 0.0 | 0.0 |
| DEX0488_026.nt.1 | 24160.01 | 5.9 | 33.3 | 7.7 | 33.3 | 0.0 | 0.0 |
| DEX0488_026.nt.1 | 24160.02 | 11.8 | 33.3 | 15.4 | 40.0 | 0.0 | 0.0 |
| DEX0488_027.nt.1 | 18644.01 | 47.1 | 72.7 | 46.2 | 66.7 | 50.0 | 100.0 |
| DEX0488_027.nt.1 | 18644.02 | 47.1 | 72.7 | 38.5 | 62.5 | 75.0 | 100.0 |
| DEX0488_027.nt.2 | 18644.01 | 47.1 | 72.7 | 46.2 | 66.7 | 50.0 | 100.0 |
| DEX0488_027.nt.2 | 18644.02 | 47.1 | 72.7 | 38.5 | 62.5 | 75.0 | 100.0 |
| DEX0488_027.nt.3 | 18644.01 | 47.1 | 72.7 | 46.2 | 66.7 | 50.0 | 100.0 |
| DEX0488_027.nt.3 | 18644.02 | 47.1 | 72.7 | 38.5 | 62.5 | 75.0 | 100.0 |
| DEX0488_027.nt.4 | 18644.01 | 47.1 | 72.7 | 46.2 | 66.7 | 50.0 | 100.0 |
| DEX0488_027.nt.4 | 18644.02 | 47.1 | 72.7 | 38.5 | 62.5 | 75.0 | 100.0 |
| DEX0488_028.nt.1 | 33088.01 | 52.9 | 60.0 | 38.5 | 45.5 | 100.0 | 100.0 |
| DEX0488_028.nt.1 | 33088.02 | 52.9 | 56.2 | 38.5 | 41.7 | 100.0 | 100.0 |
| DEX0488_028.nt.1 | 92327.01 | 52.9 | 56.2 | 61.5 | 66.7 | 25.0 | 25.0 |
| DEX0488_028.nt.1 | 92327.02 | 52.9 | 52.9 | 61.5 | 61.5 | 25.0 | 25.0 |

[0489] TABLE 2

| | | | Ovr 550 | | Ovr 550 | | Ovr 550 |
|---|---|---|---|---|---|---|---|
| | | Ovr 550 | ALL % | Ovr 550 | INV % | Ovr 550 | LMP % |
| | Oligo | ALL % up | valid up | INV % up | valid up | LMP % up | valid up |
| DEX ID | Name | n = 17 | n = 17 | n = 13 | n = 13 | n = 4 | n = 4 |
| DEX0488_004.nt.1 | 10666.01 | 5.9 | 9.1 | 0.0 | 0.0 | 25.0 | 100.0 |
| DEX0488_004.nt.1 | 10666.02 | 5.9 | 9.1 | 0.0 | 0.0 | 25.0 | 50.0 |
| DEX0488_005.nt.1 | 9744.01 | 64.7 | 64.7 | 76.9 | 76.9 | 25.0 | 25.0 |
| DEX0488_005.nt.1 | 9744.02 | 64.7 | 64.7 | 76.9 | 76.9 | 25.0 | 25.0 |
| DEX0488_011.nt.1 | 39927.01 | 64.7 | 64.7 | 76.9 | 76.9 | 25.0 | 25.0 |
| DEX0488_011.nt.1 | 39927.02 | 70.6 | 70.6 | 76.9 | 76.9 | 50.0 | 50.0 |
| DEX0488_012.nt.1 | 21187.01 | 11.8 | 20.0 | 15.4 | 25.0 | 0.0 | 0.0 |
| DEX0488_012.nt.1 | 21187.02 | 17.6 | 33.3 | 15.4 | 28.6 | 25.0 | 50.0 |
| DEX0488_021.nt.1 | 21187.01 | 11.8 | 20.0 | 15.4 | 25.0 | 0.0 | 0.0 |
| DEX0488_021.nt.1 | 21187.02 | 17.6 | 33.3 | 15.4 | 28.6 | 25.0 | 50.0 |
| DEX0488_021.nt.2 | 21187.01 | 11.8 | 20.0 | 15.4 | 25.0 | 0.0 | 0.0 |
| DEX0488_021.nt.2 | 21187.02 | 17.6 | 33.3 | 15.4 | 28.6 | 25.0 | 50.0 |
| DEX0488_022.nt.2 | 21553.01 | 0.0 | 0.0 | 0.0 | 0.0 | 0.0 | 0.0 |
| DEX0488_022.nt.2 | 21553.02 | 0.0 | 0.0 | 0.0 | 0.0 | 0.0 | 0.0 |
| DEX0488_022.nt.2 | 21577.01 | 0.0 | 0.0 | 0.0 | 0.0 | 0.0 | 0.0 |
| DEX0488_022.nt.2 | 21577.02 | 0.0 | 0.0 | 0.0 | 0.0 | 0.0 | 0.0 |
| DEX0488_022.nt.3 | 21553.01 | 0.0 | 0.0 | 0.0 | 0.0 | 0.0 | 0.0 |
| DEX0488_022.nt.3 | 21553.02 | 0.0 | 0.0 | 0.0 | 0.0 | 0.0 | 0.0 |
| DEX0488_022.nt.3 | 21577.01 | 0.0 | 0.0 | 0.0 | 0.0 | 0.0 | 0.0 |
| DEX0488_022.nt.3 | 21577.02 | 0.0 | 0.0 | 0.0 | 0.0 | 0.0 | 0.0 |
| DEX0488_022.nt.4 | 21553.01 | 0.0 | 0.0 | 0.0 | 0.0 | 0.0 | 0.0 |
| DEX0488_022.nt.4 | 21553.02 | 0.0 | 0.0 | 0.0 | 0.0 | 0.0 | 0.0 |
| DEX0488_022.nt.4 | 21577.01 | 0.0 | 0.0 | 0.0 | 0.0 | 0.0 | 0.0 |
| DEX0488_022.nt.4 | 21577.02 | 0.0 | 0.0 | 0.0 | 0.0 | 0.0 | 0.0 |
| DEX0488_022.nt.5 | 21553.01 | 0.0 | 0.0 | 0.0 | 0.0 | 0.0 | 0.0 |
| DEX0488_022.nt.5 | 21553.02 | 0.0 | 0.0 | 0.0 | 0.0 | 0.0 | 0.0 |
| DEX0488_022.nt.5 | 21577.01 | 0.0 | 0.0 | 0.0 | 0.0 | 0.0 | 0.0 |
| DEX0488_022.nt.5 | 21577.02 | 0.0 | 0.0 | 0.0 | 0.0 | 0.0 | 0.0 |
| DEX0488_024.nt.1 | 21553.01 | 0.0 | 0.0 | 0.0 | 0.0 | 0.0 | 0.0 |
| DEX0488_024.nt.1 | 21553.02 | 0.0 | 0.0 | 0.0 | 0.0 | 0.0 | 0.0 |
| DEX0488_024.nt.1 | 21577.01 | 0.0 | 0.0 | 0.0 | 0.0 | 0.0 | 0.0 |
| DEX0488_024.nt.1 | 21577.02 | 0.0 | 0.0 | 0.0 | 0.0 | 0.0 | 0.0 |
| DEX0488_026.nt.1 | 24160.01 | 5.9 | 100.0 | 7.7 | 100.0 | 0.0 | 0.0 |
| DEX0488_026.nt.1 | 24160.02 | 5.9 | 100.0 | 7.7 | 100.0 | 0.0 | 0.0 |
| DEX0488_027.nt.1 | 18644.01 | 17.6 | 60.0 | 15.4 | 50.0 | 25.0 | 100.0 |
| DEX0488_027.nt.1 | 18644.02 | 17.6 | 100.0 | 15.4 | 100.0 | 25.0 | 100.0 |
| DEX0488_027.nt.2 | 18644.01 | 17.6 | 60.0 | 15.4 | 50.0 | 25.0 | 100.0 |
| DEX0488_027.nt.2 | 18644.02 | 17.6 | 100.0 | 15.4 | 100.0 | 25.0 | 100.0 |
| DEX0488_027.nt.3 | 18644.01 | 17.6 | 60.0 | 15.4 | 50.0 | 25.0 | 100.0 |
| DEX0488_027.nt.3 | 18644.02 | 17.6 | 100.0 | 15.4 | 100.0 | 25.0 | 100.0 |
| DEX0488_027.nt.4 | 18644.01 | 17.6 | 60.0 | 15.4 | 50.0 | 25.0 | 100.0 |
| DEX0488_027.nt.4 | 18644.02 | 17.6 | 100.0 | 15.4 | 100.0 | 25.0 | 100.0 |
| DEX0488_028.nt.1 | 33088.01 | 52.9 | 81.8 | 38.5 | 71.4 | 100.0 | 100.0 |
| DEX0488_028.nt.1 | 33088.02 | 47.1 | 66.7 | 38.5 | 55.6 | 75.0 | 100.0 |
| DEX0488_028.nt.1 | 92327.01 | 47.1 | 53.3 | 53.8 | 63.6 | 25.0 | 25.0 |
| DEX0488_028.nt.1 | 92327.02 | 52.9 | 56.2 | 61.5 | 66.7 | 25.0 | 25.0 |

[0490] TABLE 3

| | | | Ovr | | Ovr | | Ovr |
|---|---|---|---|---|---|---|---|
| | | Ovr | Multi-cancer | Ovr | Multi-cancer | Ovr | Multi-cancer |
| | | Multi-cancer | ALL % | Multi-cancer | INV % | Multi-cancer | LMP % |
| | Oligo | ALL % up | valid up | INV % up | valid up | LMP % up | valid up |
| DEX ID | Name | n = 19 | n = 19 | n = 14 | n = 14 | n = 5 | n = 5 |
| DEX0488_001.nt.1 | 79931 | 26.3 | 26.3 | 21.4 | 21.4 | 40.0 | 40.0 |
| DEX0488_001.nt.1 | 79931.1 | 31.6 | 31.6 | 28.6 | 28.6 | 40.0 | 40.0 |
| DEX0488_001.nt.1 | 79932 | 42.1 | 42.1 | 35.7 | 35.7 | 60.0 | 60.0 |
| DEX0488_001.nt.1 | 79932.1 | 36.8 | 36.8 | 35.7 | 35.7 | 40.0 | 40.0 |
| DEX0488_001.nt.10 | 79931 | 26.3 | 26.3 | 21.4 | 21.4 | 40.0 | 40.0 |
| DEX0488_001.nt.10 | 79931.1 | 31.6 | 31.6 | 28.6 | 28.6 | 40.0 | 40.0 |
| DEX0488_001.nt.10 | 79932 | 42.1 | 42.1 | 35.7 | 35.7 | 60.0 | 60.0 |
| DEX0488_001.nt.10 | 79932.1 | 36.8 | 36.8 | 35.7 | 35.7 | 40.0 | 40.0 |
| DEX0488_001.nt.11 | 79931 | 26.3 | 26.3 | 21.4 | 21.4 | 40.0 | 40.0 |
| DEX0488_001.nt.11 | 79931.1 | 31.6 | 31.6 | 28.6 | 28.6 | 40.0 | 40.0 |
| DEX0488_001.nt.11 | 79932 | 42.1 | 42.1 | 35.7 | 35.7 | 60.0 | 60.0 |
| DEX0488_001.nt.11 | 79932.1 | 36.8 | 36.8 | 35.7 | 35.7 | 40.0 | 40.0 |
| DEX0488_001.nt.2 | 79931 | 26.3 | 26.3 | 21.4 | 21.4 | 40.0 | 40.0 |
| DEX0488_001.nt.2 | 79931.1 | 31.6 | 31.6 | 28.6 | 28.6 | 40.0 | 40.0 |
| DEX0488_001.nt.2 | 79932 | 42.1 | 42.1 | 35.7 | 35.7 | 60.0 | 60.0 |
| DEX0488_001.nt.2 | 79932.1 | 36.8 | 36.8 | 35.7 | 35.7 | 40.0 | 40.0 |
| DEX0488_001.nt.3 | 79931 | 26.3 | 26.3 | 21.4 | 21.4 | 40.0 | 40.0 |
| DEX0488_001.nt.3 | 79931.1 | 31.6 | 31.6 | 28.6 | 28.6 | 40.0 | 40.0 |
| DEX0488_001.nt.3 | 79932 | 42.1 | 42.1 | 35.7 | 35.7 | 60.0 | 60.0 |
| DEX0488_001.nt.3 | 79932.1 | 36.8 | 36.8 | 35.7 | 35.7 | 40.0 | 40.0 |
| DEX0488_001.nt.4 | 79931 | 26.3 | 26.3 | 21.4 | 21.4 | 40.0 | 40.0 |
| DEX0488_001.nt.4 | 79931.1 | 31.6 | 31.6 | 28.6 | 28.6 | 40.0 | 40.0 |
| DEX0488_001.nt.4 | 79932 | 42.1 | 42.1 | 35.7 | 35.7 | 60.0 | 60.0 |
| DEX0488_001.nt.4 | 79932.1 | 36.8 | 36.8 | 35.7 | 35.7 | 40.0 | 40.0 |
| DEX0488_001.nt.5 | 79931 | 26.3 | 26.3 | 21.4 | 21.4 | 40.0 | 40.0 |
| DEX0488_001.nt.5 | 79931.1 | 31.6 | 31.6 | 28.6 | 28.6 | 40.0 | 40.0 |
| DEX0488_001.nt.5 | 79932 | 42.1 | 42.1 | 35.7 | 35.7 | 60.0 | 60.0 |
| DEX0488_001.nt.5 | 79932.1 | 36.8 | 36.8 | 35.7 | 35.7 | 40.0 | 40.0 |
| DEX0488_001.nt.6 | 79931 | 26.3 | 26.3 | 21.4 | 21.4 | 40.0 | 40.0 |
| DEX0488_001.nt.6 | 79931.1 | 31.6 | 31.6 | 28.6 | 28.6 | 40.0 | 40.0 |
| DEX0488_001.nt.6 | 79932 | 42.1 | 42.1 | 35.7 | 35.7 | 60.0 | 60.0 |
| DEX0488_001.nt.6 | 79932.1 | 36.8 | 36.8 | 35.7 | 35.7 | 40.0 | 40.0 |
| DEX0488_001.nt.7 | 79931 | 26.3 | 26.3 | 21.4 | 21.4 | 40.0 | 40.0 |
| DEX0488_001.nt.7 | 79931.1 | 31.6 | 31.6 | 28.6 | 28.6 | 40.0 | 40.0 |
| DEX0488_001.nt.7 | 79932 | 42.1 | 42.1 | 35.7 | 35.7 | 60.0 | 60.0 |
| DEX0488_001.nt.7 | 79932.1 | 36.8 | 36.8 | 35.7 | 35.7 | 40.0 | 40.0 |
| DEX0488_001.nt.8 | 79931 | 26.3 | 26.3 | 21.4 | 21.4 | 40.0 | 40.0 |
| DEX0488_001.nt.8 | 79931.1 | 31.6 | 31.6 | 28.6 | 28.6 | 40.0 | 40.0 |
| DEX0488_001.nt.8 | 79932 | 42.1 | 42.1 | 35.7 | 35.7 | 60.0 | 60.0 |
| DEX0488_001.nt.8 | 79932.1 | 36.8 | 36.8 | 35.7 | 35.7 | 40.0 | 40.0 |
| DEX0488_001.nt.9 | 79931 | 26.3 | 26.3 | 21.4 | 21.4 | 40.0 | 40.0 |
| DEX0488_001.nt.9 | 79931.1 | 31.6 | 31.6 | 28.6 | 28.6 | 40.0 | 40.0 |
| DEX0488_001.nt.9 | 79932 | 42.1 | 42.1 | 35.7 | 35.7 | 60.0 | 60.0 |
| DEX0488_001.nt.9 | 79932.1 | 36.8 | 36.8 | 35.7 | 35.7 | 40.0 | 40.0 |
| DEX0488_002.nt.1 | 91111 | 10.5 | 20.0 | 7.1 | 12.5 | 20.0 | 50.0 |
| DEX0488_002.nt.1 | 91111.1 | 5.3 | 10.0 | 0.0 | 0.0 | 20.0 | 50.0 |
| DEX0488_002.nt.1 | 91112 | 0.0 | 0.0 | 0.0 | 0.0 | 0.0 | 0.0 |
| DEX0488_002.nt.1 | 91112.1 | 0.0 | 0.0 | 0.0 | 0.0 | 0.0 | 0.0 |
| DEX0488_003.nt.1 | 27921 | 0.0 | 0.0 | 0.0 | 0.0 | 0.0 | 0.0 |
| DEX0488_003.nt.1 | 27921.1 | 0.0 | 0.0 | 0.0 | 0.0 | 0.0 | 0.0 |
| DEX0488_003.nt.1 | 27922 | 0.0 | 0.0 | 0.0 | 0.0 | 0.0 | 0.0 |
| DEX0488_003.nt.1 | 27922.1 | 0.0 | 0.0 | 0.0 | 0.0 | 0.0 | 0.0 |
| DEX0488_003.nt.1 | 78855 | 10.5 | 10.5 | 0.0 | 0.0 | 40.0 | 40.0 |
| DEX0488_003.nt.1 | 78855.1 | 5.3 | 5.3 | 0.0 | 0.0 | 20.0 | 20.0 |
| DEX0488_003.nt.1 | 78856 | 10.5 | 10.5 | 0.0 | 0.0 | 40.0 | 40.0 |
| DEX0488_003.nt.1 | 78856.1 | 10.5 | 10.5 | 0.0 | 0.0 | 40.0 | 40.0 |
| DEX0488_003.nt.2 | 27921 | 0.0 | 0.0 | 0.0 | 0.0 | 0.0 | 0.0 |
| DEX0488_003.nt.2 | 27921.1 | 0.0 | 0.0 | 0.0 | 0.0 | 0.0 | 0.0 |
| DEX0488_003.nt.2 | 27922 | 0.0 | 0.0 | 0.0 | 0.0 | 0.0 | 0.0 |
| DEX0488_003.nt.2 | 27922.1 | 0.0 | 0.0 | 0.0 | 0.0 | 0.0 | 0.0 |
| DEX0488_003.nt.2 | 78855 | 10.5 | 10.5 | 0.0 | 0.0 | 40.0 | 40.0 |
| DEX0488_003.nt.2 | 78855.1 | 5.3 | 5.3 | 0.0 | 0.0 | 20.0 | 20.0 |
| DEX0488_003.nt.2 | 78856 | 10.5 | 10.5 | 0.0 | 0.0 | 40.0 | 40.0 |
| DEX0488_003.nt.2 | 78856.1 | 10.5 | 10.5 | 0.0 | 0.0 | 40.0 | 40.0 |
| DEX0488_003.nt.3 | 27921 | 0.0 | 0.0 | 0.0 | 0.0 | 0.0 | 0.0 |
| DEX0488_003.nt.3 | 27921.1 | 0.0 | 0.0 | 0.0 | 0.0 | 0.0 | 0.0 |
| DEX0488_003.nt.3 | 27922 | 0.0 | 0.0 | 0.0 | 0.0 | 0.0 | 0.0 |
| DEX0488_003.nt.3 | 27922.1 | 0.0 | 0.0 | 0.0 | 0.0 | 0.0 | 0.0 |
| DEX0488_003.nt.3 | 78855 | 10.5 | 10.5 | 0.0 | 0.0 | 40.0 | 40.0 |
| DEX0488_003.nt.3 | 78855.1 | 5.3 | 5.3 | 0.0 | 0.0 | 20.0 | 20.0 |
| DEX0488_003.nt.3 | 78856 | 10.5 | 10.5 | 0.0 | 0.0 | 40.0 | 40.0 |
| DEX0488_003.nt.3 | 78856.1 | 10.5 | 10.5 | 0.0 | 0.0 | 40.0 | 40.0 |
| DEX0488_003.nt.4 | 27921 | 0.0 | 0.0 | 0.0 | 0.0 | 0.0 | 0.0 |
| DEX0488_003.nt.4 | 27921.1 | 0.0 | 0.0 | 0.0 | 0.0 | 0.0 | 0.0 |
| DEX0488_003.nt.4 | 27922 | 0.0 | 0.0 | 0.0 | 0.0 | 0.0 | 0.0 |
| DEX0488_003.nt.4 | 27922.1 | 0.0 | 0.0 | 0.0 | 0.0 | 0.0 | 0.0 |
| DEX0488_003.nt.4 | 78855 | 10.5 | 10.5 | 0.0 | 0.0 | 40.0 | 40.0 |
| DEX0488_003.nt.4 | 78855.1 | 5.3 | 5.3 | 0.0 | 0.0 | 20.0 | 20.0 |
| DEX0488_003.nt.4 | 78856 | 10.5 | 10.5 | 0.0 | 0.0 | 40.0 | 40.0 |
| DEX0488_003.nt.4 | 78856.1 | 10.5 | 10.5 | 0.0 | 0.0 | 40.0 | 40.0 |
| DEX0488_003.nt.5 | 27921 | 0.0 | 0.0 | 0.0 | 0.0 | 0.0 | 0.0 |
| DEX0488_003.nt.5 | 27921.1 | 0.0 | 0.0 | 0.0 | 0.0 | 0.0 | 0.0 |
| DEX0488_003.nt.5 | 27922 | 0.0 | 0.0 | 0.0 | 0.0 | 0.0 | 0.0 |
| DEX0488_003.nt.5 | 27922.1 | 0.0 | 0.0 | 0.0 | 0.0 | 0.0 | 0.0 |
| DEX0488_003.nt.5 | 78855 | 10.5 | 10.5 | 0.0 | 0.0 | 40.0 | 40.0 |
| DEX0488_003.nt.5 | 78855.1 | 5.3 | 5.3 | 0.0 | 0.0 | 20.0 | 20.0 |
| DEX0488_003.nt.5 | 78856 | 10.5 | 10.5 | 0.0 | 0.0 | 40.0 | 40.0 |
| DEX0488_003.nt.5 | 78856.1 | 10.5 | 10.5 | 0.0 | 0.0 | 40.0 | 40.0 |
| DEX0488_003.nt.6 | 27921 | 0.0 | 0.0 | 0.0 | 0.0 | 0.0 | 0.0 |
| DEX0488_003.nt.6 | 27921.1 | 0.0 | 0.0 | 0.0 | 0.0 | 0.0 | 0.0 |
| DEX0488_003.nt.6 | 27922 | 0.0 | 0.0 | 0.0 | 0.0 | 0.0 | 0.0 |
| DEX0488_003.nt.6 | 27922.1 | 0.0 | 0.0 | 0.0 | 0.0 | 0.0 | 0.0 |
| DEX0488_003.nt.6 | 78855 | 10.5 | 10.5 | 0.0 | 0.0 | 40.0 | 40.0 |
| DEX0488_003.nt.6 | 78855.1 | 5.3 | 5.3 | 0.0 | 0.0 | 20.0 | 20.0 |
| DEX0488_003.nt.6 | 78856 | 10.5 | 10.5 | 0.0 | 0.0 | 40.0 | 40.0 |
| DEX0488_003.nt.6 | 78856.1 | 10.5 | 10.5 | 0.0 | 0.0 | 40.0 | 40.0 |
| DEX0488_003.nt.7 | 78855 | 10.5 | 10.5 | 0.0 | 0.0 | 40.0 | 40.0 |
| DEX0488_003.nt.7 | 78855.1 | 5.3 | 5.3 | 0.0 | 0.0 | 20.0 | 20.0 |
| DEX0488_003.nt.7 | 78856 | 10.5 | 10.5 | 0.0 | 0.0 | 40.0 | 40.0 |
| DEX0488_003.nt.7 | 78856.1 | 10.5 | 10.5 | 0.0 | 0.0 | 40.0 | 40.0 |
| DEX0488_004.nt.1 | 10666 | 10.5 | 12.5 | 0.0 | 0.0 | 40.0 | 66.7 |
| DEX0488_004.nt.1 | 10666.1 | 10.5 | 13.3 | 0.0 | 0.0 | 40.0 | 66.7 |
| DEX0488_004.nt.1 | 10667 | 21.1 | 22.2 | 7.1 | 7.1 | 60.0 | 75.0 |
| DEX0488_004.nt.1 | 10667.1 | 31.6 | 42.9 | 14.3 | 20.0 | 80.0 | 100.0 |
| DEX0488_005.nt.1 | 9744 | 42.1 | 42.1 | 50.0 | 50.0 | 20.0 | 20.0 |
| DEX0488_005.nt.1 | 9744.1 | 42.1 | 42.1 | 50.0 | 50.0 | 20.0 | 20.0 |
| DEX0488_005.nt.1 | 9745 | 52.6 | 55.6 | 64.3 | 64.3 | 20.0 | 25.0 |
| DEX0488_005.nt.1 | 9745.1 | 52.6 | 62.5 | 64.3 | 75.0 | 20.0 | 25.0 |
| DEX0488_006.nt.1 | 4353 | 26.3 | 26.3 | 28.6 | 28.6 | 20.0 | 20.0 |
| DEX0488_006.nt.1 | 4353.1 | 26.3 | 26.3 | 28.6 | 28.6 | 20.0 | 20.0 |
| DEX0488_006.nt.1 | 5804 | 31.6 | 31.6 | 28.6 | 28.6 | 40.0 | 40.0 |
| DEX0488_006.nt.1 | 5804.1 | 31.6 | 35.3 | 28.6 | 28.6 | 40.0 | 66.7 |
| DEX0488_006.nt.1 | 5804.2 | 31.6 | 31.6 | 28.6 | 28.6 | 40.0 | 40.0 |
| DEX0488_006.nt.1 | 92287 | 31.6 | 35.3 | 28.6 | 30.8 | 40.0 | 50.0 |
| DEX0488_006.nt.1 | 92287.1 | 31.6 | 35.3 | 28.6 | 30.8 | 40.0 | 50.0 |
| DEX0488_007.nt.1 | 41955 | 31.6 | 60.0 | 21.4 | 42.9 | 60.0 | 100.0 |
| DEX0488_007.nt.1 | 41955.1 | 31.6 | 50.0 | 21.4 | 33.3 | 60.0 | 100.0 |
| DEX0488_007.nt.1 | 41955.2 | 36.8 | 53.8 | 21.4 | 33.3 | 80.0 | 100.0 |
| DEX0488_007.nt.1 | 41955.3 | 36.8 | 53.8 | 21.4 | 33.3 | 80.0 | 100.0 |
| DEX0488_007.nt.1 | 41955.4 | 31.6 | 54.5 | 21.4 | 37.5 | 60.0 | 100.0 |
| DEX0488_007.nt.1 | 41956 | 31.6 | 50.0 | 21.4 | 33.3 | 60.0 | 100.0 |
| DEX0488_007.nt.1 | 41956.1 | 31.6 | 66.7 | 14.3 | 40.0 | 80.0 | 100.0 |
| DEX0488_007.nt.1 | 41956.2 | 36.8 | 58.3 | 28.6 | 44.4 | 60.0 | 100.0 |
| DEX0488_007.nt.1 | 41956.3 | 26.3 | 55.6 | 14.3 | 33.3 | 60.0 | 100.0 |
| DEX0488_007.nt.1 | 41956.4 | 31.6 | 50.0 | 21.4 | 33.3 | 60.0 | 100.0 |
| DEX0488_008.nt.1 | 17292 | 52.6 | 55.6 | 35.7 | 38.5 | 100.0 | 100.0 |
| DEX0488_008.nt.1 | 17292.1 | 52.6 | 55.6 | 35.7 | 38.5 | 100.0 | 100.0 |
| DEX0488_008.nt.1 | 17293 | 52.6 | 52.6 | 35.7 | 35.7 | 100.0 | 100.0 |
| DEX0488_008.nt.1 | 17293.1 | 52.6 | 52.6 | 35.7 | 35.7 | 100.0 | 100.0 |
| DEX0488_008.nt.1 | 2085 | 42.1 | 42.1 | 28.6 | 28.6 | 80.0 | 80.0 |
| DEX0488_008.nt.1 | 24404 | 52.6 | 52.6 | 35.7 | 35.7 | 100.0 | 100.0 |
| DEX0488_008.nt.1 | 24404.1 | 52.6 | 52.6 | 35.7 | 35.7 | 100.0 | 100.0 |
| DEX0488_008.nt.1 | 24405 | 52.6 | 52.6 | 35.7 | 35.7 | 100.0 | 100.0 |
| DEX0488_008.nt.1 | 24405.1 | 52.6 | 52.6 | 35.7 | 35.7 | 100.0 | 100.0 |
| DEX0488_008.nt.1 | 4909 | 47.4 | 47.4 | 28.6 | 28.6 | 100.0 | 100.0 |
| DEX0488_008.nt.1 | 4909.1 | 47.4 | 47.4 | 28.6 | 28.6 | 100.0 | 100.0 |
| DEX0488_008.nt.1 | 4910 | 47.4 | 47.4 | 35.7 | 35.7 | 80.0 | 80.0 |
| DEX0488_008.nt.1 | 4910.1 | 52.6 | 52.6 | 35.7 | 35.7 | 100.0 | 100.0 |
| DEX0488_008.nt.2 | 17292 | 52.6 | 55.6 | 35.7 | 38.5 | 100.0 | 100.0 |
| DEX0488_008.nt.2 | 17292.1 | 52.6 | 55.6 | 35.7 | 38.5 | 100.0 | 100.0 |
| DEX0488_008.nt.2 | 17293 | 52.6 | 52.6 | 35.7 | 35.7 | 100.0 | 100.0 |
| DEX0488_008.nt.2 | 17293.1 | 52.6 | 52.6 | 35.7 | 35.7 | 100.0 | 100.0 |
| DEX0488_008.nt.2 | 2085 | 42.1 | 42.1 | 28.6 | 28.6 | 80.0 | 80.0 |
| DEX0488_008.nt.2 | 24404 | 52.6 | 52.6 | 35.7 | 35.7 | 100.0 | 100.0 |
| DEX0488_008.nt.2 | 24404.1 | 52.6 | 52.6 | 35.7 | 35.7 | 100.0 | 100.0 |
| DEX0488_008.nt.2 | 24405 | 52.6 | 52.6 | 35.7 | 35.7 | 100.0 | 100.0 |
| DEX0488_008.nt.2 | 24405.1 | 52.6 | 52.6 | 35.7 | 35.7 | 100.0 | 100.0 |
| DEX0488_008.nt.2 | 4909 | 47.4 | 47.4 | 28.6 | 28.6 | 100.0 | 100.0 |
| DEX0488_008.nt.2 | 4909.1 | 47.4 | 47.4 | 28.6 | 28.6 | 100.0 | 100.0 |
| DEX0488_008.nt.2 | 4910 | 47.4 | 47.4 | 35.7 | 35.7 | 80.0 | 80.0 |
| DEX0488_008.nt.2 | 4910.1 | 52.6 | 52.6 | 35.7 | 35.7 | 100.0 | 100.0 |
| DEX0488_009.nt.1 | 79339 | 0.0 | 0.0 | 0.0 | 0.0 | 0.0 | 0.0 |
| DEX0488_009.nt.1 | 79339.1 | 0.0 | 0.0 | 0.0 | 0.0 | 0.0 | 0.0 |
| DEX0488_010.nt.1 | 26770 | 47.4 | 75.0 | 28.6 | 57.1 | 100.0 | 100.0 |
| DEX0488_010.nt.1 | 26770.1 | 47.4 | 75.0 | 28.6 | 57.1 | 100.0 | 100.0 |
| DEX0488_011.nt.1 | 33840 | 47.4 | 50.0 | 57.1 | 57.1 | 20.0 | 25.0 |
| DEX0488_011.nt.1 | 33840.1 | 57.9 | 61.1 | 71.4 | 71.4 | 20.0 | 25.0 |
| DEX0488_011.nt.1 | 33841 | 52.6 | 55.6 | 64.3 | 64.3 | 20.0 | 25.0 |
| DEX0488_011.nt.1 | 33841.1 | 52.6 | 55.6 | 64.3 | 64.3 | 20.0 | 25.0 |
| DEX0488_011.nt.1 | 39927 | 42.1 | 44.4 | 50.0 | 50.0 | 20.0 | 25.0 |
| DEX0488_011.nt.1 | 39927.1 | 52.6 | 55.6 | 64.3 | 64.3 | 20.0 | 25.0 |
| DEX0488_011.nt.1 | 39927.2 | 52.6 | 55.6 | 64.3 | 64.3 | 20.0 | 25.0 |
| DEX0488_011.nt.1 | 39927.3 | 52.6 | 55.6 | 64.3 | 64.3 | 20.0 | 25.0 |
| DEX0488_011.nt.1 | 39927.4 | 52.6 | 58.8 | 64.3 | 69.2 | 20.0 | 25.0 |
| DEX0488_011.nt.1 | 39928 | 47.4 | 50.0 | 57.1 | 57.1 | 20.0 | 25.0 |
| DEX0488_011.nt.1 | 39928.1 | 42.1 | 47.1 | 57.1 | 57.1 | 0.0 | 0.0 |
| DEX0488_011.nt.1 | 39928.2 | 42.1 | 44.4 | 57.1 | 57.1 | 0.0 | 0.0 |
| DEX0488_011.nt.1 | 39928.3 | 57.9 | 61.1 | 64.3 | 64.3 | 40.0 | 50.0 |
| DEX0488_011.nt.1 | 39928.4 | 47.4 | 50.0 | 57.1 | 57.1 | 20.0 | 25.0 |
| DEX0488_012.nt.1 | 21187 | 21.1 | 25.0 | 21.4 | 23.1 | 20.0 | 33.3 |
| DEX0488_012.nt.1 | 21187.1 | 21.1 | 26.7 | 21.4 | 25.0 | 20.0 | 33.3 |
| DEX0488_012.nt.1 | 21188 | 0.0 | 0.0 | 0.0 | 0.0 | 0.0 | 0.0 |
| DEX0488_012.nt.1 | 21188.1 | 5.3 | 9.1 | 0.0 | 0.0 | 20.0 | 33.3 |
| DEX0488_012.nt.1 | 78927 | 21.1 | 25.0 | 21.4 | 23.1 | 20.0 | 33.3 |
| DEX0488_012.nt.1 | 78927.1 | 15.8 | 21.4 | 14.3 | 18.2 | 20.0 | 33.3 |
| DEX0488_013.nt.1 | 79955 | 5.3 | 5.6 | 7.1 | 7.1 | 0.0 | 0.0 |
| DEX0488_013.nt.1 | 79955.1 | 5.3 | 5.6 | 7.1 | 7.1 | 0.0 | 0.0 |
| DEX0488_013.nt.1 | 79956 | 5.3 | 5.9 | 7.1 | 7.1 | 0.0 | 0.0 |
| DEX0488_013.nt.1 | 79956.1 | 5.3 | 6.2 | 7.1 | 7.7 | 0.0 | 0.0 |
| DEX0488_013.nt.1 | 79959 | 21.1 | 22.2 | 28.6 | 28.6 | 0.0 | 0.0 |
| DEX0488_013.nt.1 | 79959.1 | 21.1 | 22.2 | 28.6 | 28.6 | 0.0 | 0.0 |
| DEX0488_013.nt.1 | 79960 | 15.8 | 17.6 | 21.4 | 21.4 | 0.0 | 0.0 |
| DEX0488_013.nt.1 | 79960.1 | 15.8 | 17.6 | 21.4 | 21.4 | 0.0 | 0.0 |
| DEX0488_013.nt.1 | 79963 | 5.3 | 6.2 | 7.1 | 7.7 | 0.0 | 0.0 |
| DEX0488_013.nt.1 | 79963.1 | 10.5 | 14.3 | 14.3 | 18.2 | 0.0 | 0.0 |
| DEX0488_013.nt.1 | 79964 | 5.3 | 6.2 | 7.1 | 7.7 | 0.0 | 0.0 |
| DEX0488_013.nt.1 | 79964.1 | 5.3 | 6.2 | 7.1 | 7.7 | 0.0 | 0.0 |
| DEX0488_013.nt.2 | 79959 | 21.1 | 22.2 | 28.6 | 28.6 | 0.0 | 0.0 |
| DEX0488_013.nt.2 | 79959.1 | 21.1 | 22.2 | 28.6 | 28.6 | 0.0 | 0.0 |
| DEX0488_013.nt.2 | 79960 | 15.8 | 17.6 | 21.4 | 21.4 | 0.0 | 0.0 |
| DEX0488_013.nt.2 | 79960.1 | 15.8 | 17.6 | 21.4 | 21.4 | 0.0 | 0.0 |
| DEX0488_014.nt.1 | 90171 | 0.0 | 0.0 | 0.0 | 0.0 | 0.0 | 0.0 |
| DEX0488_014.nt.1 | 90171.1 | 0.0 | 0.0 | 0.0 | 0.0 | 0.0 | 0.0 |
| DEX0488_014.nt.1 | 90172 | 0.0 | 0.0 | 0.0 | 0.0 | 0.0 | 0.0 |
| DEX0488_014.nt.1 | 90172.1 | 10.5 | 10.5 | 14.3 | 14.3 | 0.0 | 0.0 |
| DEX0488_014.nt.2 | 90171 | 0.0 | 0.0 | 0.0 | 0.0 | 0.0 | 0.0 |
| DEX0488_014.nt.2 | 90171.1 | 0.0 | 0.0 | 0.0 | 0.0 | 0.0 | 0.0 |
| DEX0488_014.nt.2 | 90172 | 0.0 | 0.0 | 0.0 | 0.0 | 0.0 | 0.0 |
| DEX0488_014.nt.2 | 90172.1 | 10.5 | 10.5 | 14.3 | 14.3 | 0.0 | 0.0 |
| DEX0488_014.nt.3 | 90171 | 0.0 | 0.0 | 0.0 | 0.0 | 0.0 | 0.0 |
| DEX0488_014.nt.3 | 90171.1 | 0.0 | 0.0 | 0.0 | 0.0 | 0.0 | 0.0 |
| DEX0488_014.nt.3 | 90172 | 0.0 | 0.0 | 0.0 | 0.0 | 0.0 | 0.0 |
| DEX0488_014.nt.3 | 90172.1 | 10.5 | 10.5 | 14.3 | 14.3 | 0.0 | 0.0 |
| DEX0488_014.nt.4 | 90171 | 0.0 | 0.0 | 0.0 | 0.0 | 0.0 | 0.0 |
| DEX0488_014.nt.4 | 90171.1 | 0.0 | 0.0 | 0.0 | 0.0 | 0.0 | 0.0 |
| DEX0488_014.nt.4 | 90172 | 0.0 | 0.0 | 0.0 | 0.0 | 0.0 | 0.0 |
| DEX0488_014.nt.4 | 90172.1 | 10.5 | 10.5 | 14.3 | 14.3 | 0.0 | 0.0 |
| DEX0488_015.nt.1 | 78631 | 15.8 | 37.5 | 14.3 | 28.6 | 20.0 | 100.0 |
| DEX0488_015.nt.1 | 78631.1 | 15.8 | 33.3 | 14.3 | 28.6 | 20.0 | 50.0 |
| DEX0488_015.nt.1 | 78632 | 21.1 | 28.6 | 28.6 | 33.3 | 0.0 | 0.0 |
| DEX0488_015.nt.1 | 78632.1 | 26.3 | 27.8 | 28.6 | 28.6 | 20.0 | 25.0 |
| DEX0488_015.nt.2 | 78631 | 15.8 | 37.5 | 14.3 | 28.6 | 20.0 | 100.0 |
| DEX0488_015.nt.2 | 78631.1 | 15.8 | 33.3 | 14.3 | 28.6 | 20.0 | 50.0 |
| DEX0488_015.nt.2 | 78632 | 21.1 | 28.6 | 28.6 | 33.3 | 0.0 | 0.0 |
| DEX0488_015.nt.2 | 78632.1 | 26.3 | 27.8 | 28.6 | 28.6 | 20.0 | 25.0 |
| DEX0488_016.nt.1 | 79660 | 10.5 | 18.2 | 14.3 | 25.0 | 0.0 | 0.0 |
| DEX0488_016.nt.1 | 79660.1 | 15.8 | 21.4 | 21.4 | 27.3 | 0.0 | 0.0 |
| DEX0488_016.nt.10 | 79659 | 0.0 | 0.0 | 0.0 | 0.0 | 0.0 | 0.0 |
| DEX0488_016.nt.10 | 79659.1 | 0.0 | 0.0 | 0.0 | 0.0 | 0.0 | 0.0 |
| DEX0488_016.nt.10 | 79660 | 10.5 | 18.2 | 14.3 | 25.0 | 0.0 | 0.0 |
| DEX0488_016.nt.10 | 79660.1 | 15.8 | 21.4 | 21.4 | 27.3 | 0.0 | 0.0 |
| DEX0488_016.nt.11 | 79659 | 0.0 | 0.0 | 0.0 | 0.0 | 0.0 | 0.0 |
| DEX0488_016.nt.11 | 79659.1 | 0.0 | 0.0 | 0.0 | 0.0 | 0.0 | 0.0 |
| DEX0488_016.nt.11 | 79660 | 10.5 | 18.2 | 14.3 | 25.0 | 0.0 | 0.0 |
| DEX0488_016.nt.11 | 79660.1 | 15.8 | 21.4 | 21.4 | 27.3 | 0.0 | 0.0 |
| DEX0488_016.nt.2 | 79660 | 10.5 | 18.2 | 14.3 | 25.0 | 0.0 | 0.0 |
| DEX0488_016.nt.2 | 79660.1 | 15.8 | 21.4 | 21.4 | 27.3 | 0.0 | 0.0 |
| DEX0488_016.nt.3 | 79660 | 10.5 | 18.2 | 14.3 | 25.0 | 0.0 | 0.0 |
| DEX0488_016.nt.3 | 79660.1 | 15.8 | 21.4 | 21.4 | 27.3 | 0.0 | 0.0 |
| DEX0488_016.nt.4 | 79660 | 10.5 | 18.2 | 14.3 | 25.0 | 0.0 | 0.0 |
| DEX0488_016.nt.4 | 79660.1 | 15.8 | 21.4 | 21.4 | 27.3 | 0.0 | 0.0 |
| DEX0488_016.nt.5 | 79660 | 10.5 | 18.2 | 14.3 | 25.0 | 0.0 | 0.0 |
| DEX0488_016.nt.5 | 79660.1 | 15.8 | 21.4 | 21.4 | 27.3 | 0.0 | 0.0 |
| DEX0488_016.nt.6 | 79660 | 10.5 | 18.2 | 14.3 | 25.0 | 0.0 | 0.0 |
| DEX0488_016.nt.6 | 79660.1 | 15.8 | 21.4 | 21.4 | 27.3 | 0.0 | 0.0 |
| DEX0488_016.nt.7 | 79660 | 10.5 | 18.2 | 14.3 | 25.0 | 0.0 | 0.0 |
| DEX0488_016.nt.7 | 79660.1 | 15.8 | 21.4 | 21.4 | 27.3 | 0.0 | 0.0 |
| DEX0488_016.nt.8 | 79660 | 10.5 | 18.2 | 14.3 | 25.0 | 0.0 | 0.0 |
| DEX0488_016.nt.8 | 79660.1 | 15.8 | 21.4 | 21.4 | 27.3 | 0.0 | 0.0 |
| DEX0488_016.nt.9 | 79660 | 10.5 | 18.2 | 14.3 | 25.0 | 0.0 | 0.0 |
| DEX0488_016.nt.9 | 79660.1 | 15.8 | 21.4 | 21.4 | 27.3 | 0.0 | 0.0 |
| DEX0488_017.nt.1 | 4353 | 26.3 | 26.3 | 28.6 | 28.6 | 20.0 | 20.0 |
| DEX0488_017.nt.1 | 4353.1 | 26.3 | 26.3 | 28.6 | 28.6 | 20.0 | 20.0 |
| DEX0488_017.nt.1 | 5804 | 31.6 | 31.6 | 28.6 | 28.6 | 40.0 | 40.0 |
| DEX0488_017.nt.1 | 5804.1 | 31.6 | 35.3 | 28.6 | 28.6 | 40.0 | 66.7 |
| DEX0488_017.nt.1 | 5804.2 | 31.6 | 31.6 | 28.6 | 28.6 | 40.0 | 40.0 |
| DEX0488_017.nt.1 | 92287 | 31.6 | 35.3 | 28.6 | 30.8 | 40.0 | 50.0 |
| DEX0488_017.nt.1 | 92287.1 | 31.6 | 35.3 | 28.6 | 30.8 | 40.0 | 50.0 |
| DEX0488_018.nt.1 | 79936 | 10.5 | 22.2 | 14.3 | 25.0 | 0.0 | 0.0 |
| DEX0488_018.nt.1 | 79936.1 | 5.3 | 12.5 | 7.1 | 14.3 | 0.0 | 0.0 |
| DEX0488_018.nt.1 | 79944 | 5.3 | 9.1 | 7.1 | 11.1 | 0.0 | 0.0 |
| DEX0488_018.nt.1 | 79944.1 | 5.3 | 11.1 | 7.1 | 14.3 | 0.0 | 0.0 |
| DEX0488_018.nt.2 | 79936 | 10.5 | 22.2 | 14.3 | 25.0 | 0.0 | 0.0 |
| DEX0488_018.nt.2 | 79936.1 | 5.3 | 12.5 | 7.1 | 14.3 | 0.0 | 0.0 |
| DEX0488_018.nt.2 | 79944 | 5.3 | 9.1 | 7.1 | 11.1 | 0.0 | 0.0 |
| DEX0488_018.nt.2 | 79944.1 | 5.3 | 11.1 | 7.1 | 14.3 | 0.0 | 0.0 |
| DEX0488_018.nt.3 | 79936 | 10.5 | 22.2 | 14.3 | 25.0 | 0.0 | 0.0 |
| DEX0488_018.nt.3 | 79936.1 | 5.3 | 12.5 | 7.1 | 14.3 | 0.0 | 0.0 |
| DEX0488_018.nt.3 | 79944 | 5.3 | 9.1 | 7.1 | 11.1 | 0.0 | 0.0 |
| DEX0488_018.nt.3 | 79944.1 | 5.3 | 11.1 | 7.1 | 14.3 | 0.0 | 0.0 |
| DEX0488_018.nt.4 | 79936 | 10.5 | 22.2 | 14.3 | 25.0 | 0.0 | 0.0 |
| DEX0488_018.nt.4 | 79936.1 | 5.3 | 12.5 | 7.1 | 14.3 | 0.0 | 0.0 |
| DEX0488_018.nt.4 | 79944 | 5.3 | 9.1 | 7.1 | 11.1 | 0.0 | 0.0 |
| DEX0488_018.nt.4 | 79944.1 | 5.3 | 11.1 | 7.1 | 14.3 | 0.0 | 0.0 |
| DEX0488_018.nt.5 | 79936 | 10.5 | 22.2 | 14.3 | 25.0 | 0.0 | 0.0 |
| DEX0488_018.nt.5 | 79936.1 | 5.3 | 12.5 | 7.1 | 14.3 | 0.0 | 0.0 |
| DEX0488_018.nt.5 | 79944 | 5.3 | 9.1 | 7.1 | 11.1 | 0.0 | 0.0 |
| DEX0488_018.nt.5 | 79944.1 | 5.3 | 11.1 | 7.1 | 14.3 | 0.0 | 0.0 |
| DEX0488_018.nt.6 | 79936 | 10.5 | 22.2 | 14.3 | 25.0 | 0.0 | 0.0 |
| DEX0488_018.nt.6 | 79936.1 | 5.3 | 12.5 | 7.1 | 14.3 | 0.0 | 0.0 |
| DEX0488_018.nt.6 | 79944 | 5.3 | 9.1 | 7.1 | 11.1 | 0.0 | 0.0 |
| DEX0488_018.nt.6 | 79944.1 | 5.3 | 11.1 | 7.1 | 14.3 | 0.0 | 0.0 |
| DEX0488_018.nt.7 | 79936 | 10.5 | 22.2 | 14.3 | 25.0 | 0.0 | 0.0 |
| DEX0488_018.nt.7 | 79936.1 | 5.3 | 12.5 | 7.1 | 14.3 | 0.0 | 0.0 |
| DEX0488_018.nt.7 | 79944 | 5.3 | 9.1 | 7.1 | 11.1 | 0.0 | 0.0 |
| DEX0488_018.nt.7 | 79944.1 | 5.3 | 11.1 | 7.1 | 14.3 | 0.0 | 0.0 |
| DEX0488_018.nt.8 | 79936 | 10.5 | 22.2 | 14.3 | 25.0 | 0.0 | 0.0 |
| DEX0488_018.nt.8 | 79936.1 | 5.3 | 12.5 | 7.1 | 14.3 | 0.0 | 0.0 |
| DEX0488_018.nt.8 | 79944 | 5.3 | 9.1 | 7.1 | 11.1 | 0.0 | 0.0 |
| DEX0488_018.nt.8 | 79944.1 | 5.3 | 11.1 | 7.1 | 14.3 | 0.0 | 0.0 |
| DEX0488_019.nt.1 | 79955 | 5.3 | 5.6 | 7.1 | 7.1 | 0.0 | 0.0 |
| DEX0488_019.nt.1 | 79955.1 | 5.3 | 5.6 | 7.1 | 7.1 | 0.0 | 0.0 |
| DEX0488_019.nt.1 | 79956 | 5.3 | 5.9 | 7.1 | 7.1 | 0.0 | 0.0 |
| DEX0488_019.nt.1 | 79956.1 | 5.3 | 6.2 | 7.1 | 7.7 | 0.0 | 0.0 |
| DEX0488_019.nt.1 | 79959 | 21.1 | 22.2 | 28.6 | 28.6 | 0.0 | 0.0 |
| DEX0488_019.nt.1 | 79959.1 | 21.1 | 22.2 | 28.6 | 28.6 | 0.0 | 0.0 |
| DEX0488_019.nt.1 | 79960 | 15.8 | 17.6 | 21.4 | 21.4 | 0.0 | 0.0 |
| DEX0488_019.nt.1 | 79960.1 | 15.8 | 17.6 | 21.4 | 21.4 | 0.0 | 0.0 |
| DEX0488_019.nt.1 | 79963 | 5.3 | 6.2 | 7.1 | 7.7 | 0.0 | 0.0 |
| DEX0488_019.nt.1 | 79963.1 | 10.5 | 14.3 | 14.3 | 18.2 | 0.0 | 0.0 |
| DEX0488_019.nt.1 | 79964 | 5.3 | 6.2 | 7.1 | 7.7 | 0.0 | 0.0 |
| DEX0488_019.nt.1 | 79964.1 | 5.3 | 6.2 | 7.1 | 7.7 | 0.0 | 0.0 |
| DEX0488_019.nt.2 | 79955 | 5.3 | 5.6 | 7.1 | 7.1 | 0.0 | 0.0 |
| DEX0488_019.nt.2 | 79955.1 | 5.3 | 5.6 | 7.1 | 7.1 | 0.0 | 0.0 |
| DEX0488_019.nt.2 | 79956 | 5.3 | 5.9 | 7.1 | 7.1 | 0.0 | 0.0 |
| DEX0488_019.nt.2 | 79956.1 | 5.3 | 6.2 | 7.1 | 7.7 | 0.0 | 0.0 |
| DEX0488_019.nt.2 | 79959 | 21.1 | 22.2 | 28.6 | 28.6 | 0.0 | 0.0 |
| DEX0488_019.nt.2 | 79959.1 | 21.1 | 22.2 | 28.6 | 28.6 | 0.0 | 0.0 |
| DEX0488_019.nt.2 | 79960 | 15.8 | 17.6 | 21.4 | 21.4 | 0.0 | 0.0 |
| DEX0488_019.nt.2 | 79960.1 | 15.8 | 17.6 | 21.4 | 21.4 | 0.0 | 0.0 |
| DEX0488_019.nt.2 | 79963 | 5.3 | 6.2 | 7.1 | 7.7 | 0.0 | 0.0 |
| DEX0488_019.nt.2 | 79963.1 | 10.5 | 14.3 | 14.3 | 18.2 | 0.0 | 0.0 |
| DEX0488_019.nt.2 | 79964 | 5.3 | 6.2 | 7.1 | 7.7 | 0.0 | 0.0 |
| DEX0488_019.nt.2 | 79964.1 | 5.3 | 6.2 | 7.1 | 7.7 | 0.0 | 0.0 |
| DEX0488_019.nt.3 | 79955 | 5.3 | 5.6 | 7.1 | 7.1 | 0.0 | 0.0 |
| DEX0488_019.nt.3 | 79955.1 | 5.3 | 5.6 | 7.1 | 7.1 | 0.0 | 0.0 |
| DEX0488_019.nt.3 | 79956 | 5.3 | 5.9 | 7.1 | 7.1 | 0.0 | 0.0 |
| DEX0488_019.nt.3 | 79956.1 | 5.3 | 6.2 | 7.1 | 7.7 | 0.0 | 0.0 |
| DEX0488_019.nt.3 | 79959 | 21.1 | 22.2 | 28.6 | 28.6 | 0.0 | 0.0 |
| DEX0488_019.nt.3 | 79959.1 | 21.1 | 22.2 | 28.6 | 28.6 | 0.0 | 0.0 |
| DEX0488_019.nt.3 | 79960 | 15.8 | 17.6 | 21.4 | 21.4 | 0.0 | 0.0 |
| DEX0488_019.nt.3 | 79960.1 | 15.8 | 17.6 | 21.4 | 21.4 | 0.0 | 0.0 |
| DEX0488_019.nt.3 | 79963 | 5.3 | 6.2 | 7.1 | 7.7 | 0.0 | 0.0 |
| DEX0488_019.nt.3 | 79963.1 | 10.5 | 14.3 | 14.3 | 18.2 | 0.0 | 0.0 |
| DEX0488_019.nt.3 | 79964 | 5.3 | 6.2 | 7.1 | 7.7 | 0.0 | 0.0 |
| DEX0488_019.nt.3 | 79964.1 | 5.3 | 6.2 | 7.1 | 7.7 | 0.0 | 0.0 |
| DEX0488_019.nt.4 | 79955 | 5.3 | 5.6 | 7.1 | 7.1 | 0.0 | 0.0 |
| DEX0488_019.nt.4 | 79955.1 | 5.3 | 5.6 | 7.1 | 7.1 | 0.0 | 0.0 |
| DEX0488_019.nt.4 | 79956 | 5.3 | 5.9 | 7.1 | 7.1 | 0.0 | 0.0 |
| DEX0488_019.nt.4 | 79956.1 | 5.3 | 6.2 | 7.1 | 7.7 | 0.0 | 0.0 |
| DEX0488_019.nt.4 | 79959 | 21.1 | 22.2 | 28.6 | 28.6 | 0.0 | 0.0 |
| DEX0488_019.nt.4 | 79959.1 | 21.1 | 22.2 | 28.6 | 28.6 | 0.0 | 0.0 |
| DEX0488_019.nt.4 | 79960 | 15.8 | 17.6 | 21.4 | 21.4 | 0.0 | 0.0 |
| DEX0488_019.nt.4 | 79960.1 | 15.8 | 17.6 | 21.4 | 21.4 | 0.0 | 0.0 |
| DEX0488_019.nt.4 | 79963 | 5.3 | 6.2 | 7.1 | 7.7 | 0.0 | 0.0 |
| DEX0488_019.nt.4 | 79963.1 | 10.5 | 14.3 | 14.3 | 18.2 | 0.0 | 0.0 |
| DEX0488_019.nt.4 | 79964 | 5.3 | 6.2 | 7.1 | 7.7 | 0.0 | 0.0 |
| DEX0488_019.nt.4 | 79964.1 | 5.3 | 6.2 | 7.1 | 7.7 | 0.0 | 0.0 |
| DEX0488_019.nt.5 | 79959 | 21.1 | 22.2 | 28.6 | 28.6 | 0.0 | 0.0 |
| DEX0488_019.nt.5 | 79959.1 | 21.1 | 22.2 | 28.6 | 28.6 | 0.0 | 0.0 |
| DEX0488_019.nt.5 | 79960 | 15.8 | 17.6 | 21.4 | 21.4 | 0.0 | 0.0 |
| DEX0488_019.nt.5 | 79960.1 | 15.8 | 17.6 | 21.4 | 21.4 | 0.0 | 0.0 |
| DEX0488_019.nt.6 | 79955 | 5.3 | 5.6 | 7.1 | 7.1 | 0.0 | 0.0 |
| DEX0488_019.nt.6 | 79955.1 | 5.3 | 5.6 | 7.1 | 7.1 | 0.0 | 0.0 |
| DEX0488_019.nt.6 | 79956 | 5.3 | 5.9 | 7.1 | 7.1 | 0.0 | 0.0 |
| DEX0488_019.nt.6 | 79956.1 | 5.3 | 6.2 | 7.1 | 7.7 | 0.0 | 0.0 |
| DEX0488_019.nt.6 | 79959 | 21.1 | 22.2 | 28.6 | 28.6 | 0.0 | 0.0 |
| DEX0488_019.nt.6 | 79959.1 | 21.1 | 22.2 | 28.6 | 28.6 | 0.0 | 0.0 |
| DEX0488_019.nt.6 | 79960 | 15.8 | 17.6 | 21.4 | 21.4 | 0.0 | 0.0 |
| DEX0488_019.nt.6 | 79960.1 | 15.8 | 17.6 | 21.4 | 21.4 | 0.0 | 0.0 |
| DEX0488_019.nt.6 | 79963 | 5.3 | 6.2 | 7.1 | 7.7 | 0.0 | 0.0 |
| DEX0488_019.nt.6 | 79963.1 | 10.5 | 14.3 | 14.3 | 18.2 | 0.0 | 0.0 |
| DEX0488_019.nt.6 | 79964 | 5.3 | 6.2 | 7.1 | 7.7 | 0.0 | 0.0 |
| DEX0488_019.nt.6 | 79964.1 | 5.3 | 6.2 | 7.1 | 7.7 | 0.0 | 0.0 |
| DEX0488_019.nt.7 | 79955 | 5.3 | 5.6 | 7.1 | 7.1 | 0.0 | 0.0 |
| DEX0488_019.nt.7 | 79955.1 | 5.3 | 5.6 | 7.1 | 7.1 | 0.0 | 0.0 |
| DEX0488_019.nt.7 | 79956 | 5.3 | 5.9 | 7.1 | 7.1 | 0.0 | 0.0 |
| DEX0488_019.nt.7 | 79956.1 | 5.3 | 6.2 | 7.1 | 7.7 | 0.0 | 0.0 |
| DEX0488_019.nt.7 | 79959 | 21.1 | 22.2 | 28.6 | 28.6 | 0.0 | 0.0 |
| DEX0488_019.nt.7 | 79959.1 | 21.1 | 22.2 | 28.6 | 28.6 | 0.0 | 0.0 |
| DEX0488_019.nt.7 | 79960 | 15.8 | 17.6 | 21.4 | 21.4 | 0.0 | 0.0 |
| DEX0488_019.nt.7 | 79960.1 | 15.8 | 17.6 | 21.4 | 21.4 | 0.0 | 0.0 |
| DEX0488_019.nt.7 | 79963 | 5.3 | 6.2 | 7.1 | 7.7 | 0.0 | 0.0 |
| DEX0488_019.nt.7 | 79963.1 | 10.5 | 14.3 | 14.3 | 18.2 | 0.0 | 0.0 |
| DEX0488_019.nt.7 | 79964 | 5.3 | 6.2 | 7.1 | 7.7 | 0.0 | 0.0 |
| DEX0488_019.nt.7 | 79964.1 | 5.3 | 6.2 | 7.1 | 7.7 | 0.0 | 0.0 |
| DEX0488_019.nt.8 | 79955 | 5.3 | 5.6 | 7.1 | 7.1 | 0.0 | 0.0 |
| DEX0488_019.nt.8 | 79955.1 | 5.3 | 5.6 | 7.1 | 7.1 | 0.0 | 0.0 |
| DEX0488_019.nt.8 | 79956 | 5.3 | 5.9 | 7.1 | 7.1 | 0.0 | 0.0 |
| DEX0488_019.nt.8 | 79956.1 | 5.3 | 6.2 | 7.1 | 7.7 | 0.0 | 0.0 |
| DEX0488_019.nt.8 | 79959 | 21.1 | 22.2 | 28.6 | 28.6 | 0.0 | 0.0 |
| DEX0488_019.nt.8 | 79959.1 | 21.1 | 22.2 | 28.6 | 28.6 | 0.0 | 0.0 |
| DEX0488_019.nt.8 | 79960 | 15.8 | 17.6 | 21.4 | 21.4 | 0.0 | 0.0 |
| DEX0488_019.nt.8 | 79960.1 | 15.8 | 17.6 | 21.4 | 21.4 | 0.0 | 0.0 |
| DEX0488_019.nt.8 | 79963 | 5.3 | 6.2 | 7.1 | 7.7 | 0.0 | 0.0 |
| DEX0488_019.nt.8 | 79963.1 | 10.5 | 14.3 | 14.3 | 18.2 | 0.0 | 0.0 |
| DEX0488_019.nt.8 | 79964 | 5.3 | 6.2 | 7.1 | 7.7 | 0.0 | 0.0 |
| DEX0488_019.nt.8 | 79964.1 | 5.3 | 6.2 | 7.1 | 7.7 | 0.0 | 0.0 |
| DEX0488_020.nt.1 | 77771 | 52.6 | 71.4 | 64.3 | 90.0 | 20.0 | 25.0 |
| DEX0488_020.nt.1 | 77771.1 | 52.6 | 76.9 | 64.3 | 90.0 | 20.0 | 33.3 |
| DEX0488_020.nt.1 | 77772 | 42.1 | 66.7 | 57.1 | 80.0 | 0.0 | 0.0 |
| DEX0488_020.nt.1 | 77772.1 | 57.9 | 78.6 | 64.3 | 90.0 | 40.0 | 50.0 |
| DEX0488_021.nt.1 | 21187 | 21.1 | 25.0 | 21.4 | 23.1 | 20.0 | 33.3 |
| DEX0488_021.nt.1 | 21187.1 | 21.1 | 26.7 | 21.4 | 25.0 | 20.0 | 33.3 |
| DEX0488_021.nt.1 | 78927 | 21.1 | 25.0 | 21.4 | 23.1 | 20.0 | 33.3 |
| DEX0488_021.nt.1 | 78927.1 | 15.8 | 21.4 | 14.3 | 18.2 | 20.0 | 33.3 |
| DEX0488_021.nt.1 | 78928 | 0.0 | 0.0 | 0.0 | 0.0 | 0.0 | 0.0 |
| DEX0488_021.nt.1 | 78928.1 | 0.0 | 0.0 | 0.0 | 0.0 | 0.0 | 0.0 |
| DEX0488_021.nt.2 | 21187 | 21.1 | 25.0 | 21.4 | 23.1 | 20.0 | 33.3 |
| DEX0488_021.nt.2 | 21187.1 | 21.1 | 26.7 | 21.4 | 25.0 | 20.0 | 33.3 |
| DEX0488_021.nt.2 | 78927 | 21.1 | 25.0 | 21.4 | 23.1 | 20.0 | 33.3 |
| DEX0488_021.nt.2 | 78927.1 | 15.8 | 21.4 | 14.3 | 18.2 | 20.0 | 33.3 |
| DEX0488_021.nt.2 | 78928 | 0.0 | 0.0 | 0.0 | 0.0 | 0.0 | 0.0 |
| DEX0488_021.nt.2 | 78928.1 | 0.0 | 0.0 | 0.0 | 0.0 | 0.0 | 0.0 |
| DEX0488_022.nt.1 | 79699 | 10.5 | 10.5 | 14.3 | 14.3 | 0.0 | 0.0 |
| DEX0488_022.nt.1 | 79699.1 | 10.5 | 10.5 | 14.3 | 14.3 | 0.0 | 0.0 |
| DEX0488_022.nt.1 | 79700 | 10.5 | 10.5 | 14.3 | 14.3 | 0.0 | 0.0 |
| DEX0488_022.nt.1 | 79700.1 | 26.3 | 26.3 | 21.4 | 21.4 | 40.0 | 40.0 |
| DEX0488_022.nt.2 | 79699 | 10.5 | 10.5 | 14.3 | 14.3 | 0.0 | 0.0 |
| DEX0488_022.nt.2 | 79699.1 | 10.5 | 10.5 | 14.3 | 14.3 | 0.0 | 0.0 |
| DEX0488_022.nt.2 | 79700 | 10.5 | 10.5 | 14.3 | 14.3 | 0.0 | 0.0 |
| DEX0488_022.nt.2 | 79700.1 | 26.3 | 26.3 | 21.4 | 21.4 | 40.0 | 40.0 |
| DEX0488_022.nt.3 | 79699 | 10.5 | 10.5 | 14.3 | 14.3 | 0.0 | 0.0 |
| DEX0488_022.nt.3 | 79699.1 | 10.5 | 10.5 | 14.3 | 14.3 | 0.0 | 0.0 |
| DEX0488_022.nt.3 | 79700 | 10.5 | 10.5 | 14.3 | 14.3 | 0.0 | 0.0 |
| DEX0488_022.nt.3 | 79700.1 | 26.3 | 26.3 | 21.4 | 21.4 | 40.0 | 40.0 |
| DEX0488_022.nt.4 | 79699 | 10.5 | 10.5 | 14.3 | 14.3 | 0.0 | 0.0 |
| DEX0488_022.nt.4 | 79699.1 | 10.5 | 10.5 | 14.3 | 14.3 | 0.0 | 0.0 |
| DEX0488_022.nt.4 | 79700 | 10.5 | 10.5 | 14.3 | 14.3 | 0.0 | 0.0 |
| DEX0488_022.nt.4 | 79700.1 | 26.3 | 26.3 | 21.4 | 21.4 | 40.0 | 40.0 |
| DEX0488_022.nt.5 | 79699 | 10.5 | 10.5 | 14.3 | 14.3 | 0.0 | 0.0 |
| DEX0488_022.nt.5 | 79699.1 | 10.5 | 10.5 | 14.3 | 14.3 | 0.0 | 0.0 |
| DEX0488_022.nt.5 | 79700 | 10.5 | 10.5 | 14.3 | 14.3 | 0.0 | 0.0 |
| DEX0488_022.nt.5 | 79700.1 | 26.3 | 26.3 | 21.4 | 21.4 | 40.0 | 40.0 |
| DEX0488_022.nt.6 | 79699 | 10.5 | 10.5 | 14.3 | 14.3 | 0.0 | 0.0 |
| DEX0488_022.nt.6 | 79699.1 | 10.5 | 10.5 | 14.3 | 14.3 | 0.0 | 0.0 |
| DEX0488_022.nt.6 | 79700 | 10.5 | 10.5 | 14.3 | 14.3 | 0.0 | 0.0 |
| DEX0488_022.nt.6 | 79700.1 | 26.3 | 26.3 | 21.4 | 21.4 | 40.0 | 40.0 |
| DEX0488_022.nt.7 | 79699 | 10.5 | 10.5 | 14.3 | 14.3 | 0.0 | 0.0 |
| DEX0488_022.nt.7 | 79699.1 | 10.5 | 10.5 | 14.3 | 14.3 | 0.0 | 0.0 |
| DEX0488_022.nt.7 | 79700 | 10.5 | 10.5 | 14.3 | 14.3 | 0.0 | 0.0 |
| DEX0488_022.nt.7 | 79700.1 | 26.3 | 26.3 | 21.4 | 21.4 | 40.0 | 40.0 |
| DEX0488_022.nt.8 | 79699 | 10.5 | 10.5 | 14.3 | 14.3 | 0.0 | 0.0 |
| DEX0488_022.nt.8 | 79699.1 | 10.5 | 10.5 | 14.3 | 14.3 | 0.0 | 0.0 |
| DEX0488_022.nt.8 | 79700 | 10.5 | 10.5 | 14.3 | 14.3 | 0.0 | 0.0 |
| DEX0488_022.nt.8 | 79700.1 | 26.3 | 26.3 | 21.4 | 21.4 | 40.0 | 40.0 |
| DEX0488_023.nt.1 | 78715 | 42.1 | 44.4 | 57.1 | 57.1 | 0.0 | 0.0 |
| DEX0488_023.nt.1 | 78715.1 | 21.1 | 44.4 | 28.6 | 50.0 | 0.0 | 0.0 |
| DEX0488_023.nt.1 | 78716 | 42.1 | 42.1 | 57.1 | 57.1 | 0.0 | 0.0 |
| DEX0488_023.nt.1 | 78716.1 | 42.1 | 42.1 | 57.1 | 57.1 | 0.0 | 0.0 |
| DEX0488_023.nt.2 | 78715 | 42.1 | 44.4 | 57.1 | 57.1 | 0.0 | 0.0 |
| DEX0488_023.nt.2 | 78715.1 | 21.1 | 44.4 | 28.6 | 50.0 | 0.0 | 0.0 |
| DEX0488_023.nt.2 | 78716 | 42.1 | 42.1 | 57.1 | 57.1 | 0.0 | 0.0 |
| DEX0488_023.nt.2 | 78716.1 | 42.1 | 42.1 | 57.1 | 57.1 | 0.0 | 0.0 |
| DEX0488_024.nt.1 | 79699 | 10.5 | 10.5 | 14.3 | 14.3 | 0.0 | 0.0 |
| DEX0488_024.nt.1 | 79699.1 | 10.5 | 10.5 | 14.3 | 14.3 | 0.0 | 0.0 |
| DEX0488_024.nt.1 | 79700 | 10.5 | 10.5 | 14.3 | 14.3 | 0.0 | 0.0 |
| DEX0488_024.nt.1 | 79700.1 | 26.3 | 26.3 | 21.4 | 21.4 | 40.0 | 40.0 |
| DEX0488_024.nt.2 | 79699 | 10.5 | 10.5 | 14.3 | 14.3 | 0.0 | 0.0 |
| DEX0488_024.nt.2 | 79699.1 | 10.5 | 10.5 | 14.3 | 14.3 | 0.0 | 0.0 |
| DEX0488_024.nt.2 | 79700 | 10.5 | 10.5 | 14.3 | 14.3 | 0.0 | 0.0 |
| DEX0488_024.nt.2 | 79700.1 | 26.3 | 26.3 | 21.4 | 21.4 | 40.0 | 40.0 |
| DEX0488_025.nt.1 | 90527 | 5.3 | 20.0 | 7.1 | 25.0 | 0.0 | 0.0 |
| DEX0488_025.nt.1 | 90527.1 | 0.0 | 0.0 | 0.0 | 0.0 | 0.0 | 0.0 |
| DEX0488_025.nt.1 | 90528 | 10.5 | 10.5 | 7.1 | 7.1 | 20.0 | 20.0 |
| DEX0488_025.nt.1 | 90528.1 | 0.0 | 0.0 | 0.0 | 0.0 | 0.0 | 0.0 |
| DEX0488_025.nt.1 | 90543 | 0.0 | 0.0 | 0.0 | 0.0 | 0.0 | 0.0 |
| DEX0488_025.nt.1 | 90543.1 | 0.0 | 0.0 | 0.0 | 0.0 | 0.0 | 0.0 |
| DEX0488_025.nt.1 | 90544 | 0.0 | 0.0 | 0.0 | 0.0 | 0.0 | 0.0 |
| DEX0488_025.nt.1 | 90544.1 | 5.3 | 5.6 | 7.1 | 7.1 | 0.0 | 0.0 |
| DEX0488_025.nt.1 | 91047 | 0.0 | 0.0 | 0.0 | 0.0 | 0.0 | 0.0 |
| DEX0488_025.nt.1 | 91047.1 | 0.0 | 0.0 | 0.0 | 0.0 | 0.0 | 0.0 |
| DEX0488_025.nt.1 | 91048 | 0.0 | 0.0 | 0.0 | 0.0 | 0.0 | 0.0 |
| DEX0488_025.nt.1 | 91048.1 | 0.0 | 0.0 | 0.0 | 0.0 | 0.0 | 0.0 |
| DEX0488_025.nt.1 | 91051 | 0.0 | 0.0 | 0.0 | 0.0 | 0.0 | 0.0 |
| DEX0488_025.nt.1 | 91051.1 | 0.0 | 0.0 | 0.0 | 0.0 | 0.0 | 0.0 |
| DEX0488_025.nt.1 | 91052 | 0.0 | 0.0 | 0.0 | 0.0 | 0.0 | 0.0 |
| DEX0488_025.nt.1 | 91052.1 | 0.0 | 0.0 | 0.0 | 0.0 | 0.0 | 0.0 |
| DEX0488_025.nt.1 | 91055 | 0.0 | 0.0 | 0.0 | 0.0 | 0.0 | 0.0 |
| DEX0488_025.nt.1 | 91055.1 | 0.0 | 0.0 | 0.0 | 0.0 | 0.0 | 0.0 |
| DEX0488_025.nt.1 | 91056 | 0.0 | 0.0 | 0.0 | 0.0 | 0.0 | 0.0 |
| DEX0488_025.nt.1 | 91056.1 | 0.0 | 0.0 | 0.0 | 0.0 | 0.0 | 0.0 |
| DEX0488_025.nt.1 | 91171 | 0.0 | 0.0 | 0.0 | 0.0 | 0.0 | 0.0 |
| DEX0488_025.nt.1 | 91171.1 | 0.0 | 0.0 | 0.0 | 0.0 | 0.0 | 0.0 |
| DEX0488_025.nt.1 | 91172 | 0.0 | 0.0 | 0.0 | 0.0 | 0.0 | 0.0 |
| DEX0488_025.nt.1 | 91172.1 | 5.3 | 5.9 | 7.1 | 7.7 | 0.0 | 0.0 |
| DEX0488_025.nt.1 | 91271 | 5.3 | 14.3 | 7.1 | 16.7 | 0.0 | 0.0 |
| DEX0488_025.nt.1 | 91271.1 | 0.0 | 0.0 | 0.0 | 0.0 | 0.0 | 0.0 |
| DEX0488_025.nt.1 | 91272 | 0.0 | 0.0 | 0.0 | 0.0 | 0.0 | 0.0 |
| DEX0488_025.nt.1 | 91272.1 | 0.0 | 0.0 | 0.0 | 0.0 | 0.0 | 0.0 |
| DEX0488_025.nt.1 | 91275 | 0.0 | 0.0 | 0.0 | 0.0 | 0.0 | 0.0 |
| DEX0488_025.nt.1 | 91275.1 | 0.0 | 0.0 | 0.0 | 0.0 | 0.0 | 0.0 |
| DEX0488_025.nt.1 | 91276 | 5.3 | 5.3 | 0.0 | 0.0 | 20.0 | 20.0 |
| DEX0488_025.nt.1 | 91276.1 | 0.0 | 0.0 | 0.0 | 0.0 | 0.0 | 0.0 |
| DEX0488_025.nt.2 | 90528 | 10.5 | 10.5 | 7.1 | 7.1 | 20.0 | 20.0 |
| DEX0488_025.nt.2 | 90528.1 | 0.0 | 0.0 | 0.0 | 0.0 | 0.0 | 0.0 |
| DEX0488_025.nt.2 | 90544 | 0.0 | 0.0 | 0.0 | 0.0 | 0.0 | 0.0 |
| DEX0488_025.nt.2 | 90544.1 | 5.3 | 5.6 | 7.1 | 7.1 | 0.0 | 0.0 |
| DEX0488_025.nt.2 | 91172 | 0.0 | 0.0 | 0.0 | 0.0 | 0.0 | 0.0 |
| DEX0488_025.nt.2 | 91172.1 | 5.3 | 5.9 | 7.1 | 7.7 | 0.0 | 0.0 |
| DEX0488_025.nt.2 | 91272 | 0.0 | 0.0 | 0.0 | 0.0 | 0.0 | 0.0 |
| DEX0488_025.nt.2 | 91272.1 | 0.0 | 0.0 | 0.0 | 0.0 | 0.0 | 0.0 |
| DEX0488_025.nt.2 | 91276 | 5.3 | 5.3 | 0.0 | 0.0 | 20.0 | 20.0 |
| DEX0488_025.nt.2 | 91276.1 | 0.0 | 0.0 | 0.0 | 0.0 | 0.0 | 0.0 |
| DEX0488_026.nt.1 | 24160 | 5.3 | 12.5 | 7.1 | 14.3 | 0.0 | 0.0 |
| DEX0488_026.nt.1 | 24160.1 | 5.3 | 14.3 | 7.1 | 16.7 | 0.0 | 0.0 |
| DEX0488_026.nt.1 | 24160.2 | 5.3 | 11.1 | 7.1 | 12.5 | 0.0 | 0.0 |
| DEX0488_026.nt.1 | 24160.3 | 5.3 | 12.5 | 7.1 | 16.7 | 0.0 | 0.0 |
| DEX0488_026.nt.1 | 26816 | 5.3 | 11.1 | 7.1 | 12.5 | 0.0 | 0.0 |
| DEX0488_026.nt.1 | 26816.1 | 5.3 | 12.5 | 7.1 | 16.7 | 0.0 | 0.0 |
| DEX0488_027.nt.1 | 17852 | 42.1 | 61.5 | 28.6 | 44.4 | 80.0 | 100.0 |
| DEX0488_027.nt.1 | 17852.1 | 47.4 | 69.2 | 35.7 | 55.6 | 80.0 | 100.0 |
| DEX0488_027.nt.1 | 17853 | 21.1 | 44.4 | 14.3 | 28.6 | 40.0 | 100.0 |
| DEX0488_027.nt.1 | 17853.1 | 21.1 | 50.0 | 14.3 | 33.3 | 40.0 | 100.0 |
| DEX0488_027.nt.1 | 18644 | 42.1 | 61.5 | 28.6 | 44.4 | 80.0 | 100.0 |
| DEX0488_027.nt.1 | 18644.1 | 42.1 | 66.7 | 28.6 | 50.0 | 80.0 | 100.0 |
| DEX0488_027.nt.1 | 18644.2 | 31.6 | 60.0 | 21.4 | 42.9 | 60.0 | 100.0 |
| DEX0488_027.nt.1 | 18644.3 | 42.1 | 66.7 | 35.7 | 55.6 | 60.0 | 100.0 |
| DEX0488_027.nt.1 | 18645 | 31.6 | 60.0 | 21.4 | 42.9 | 60.0 | 100.0 |
| DEX0488_027.nt.1 | 18645.1 | 31.6 | 60.0 | 21.4 | 42.9 | 60.0 | 100.0 |
| DEX0488_027.nt.1 | 18645.2 | 31.6 | 66.7 | 21.4 | 50.0 | 60.0 | 100.0 |
| DEX0488_027.nt.1 | 18645.3 | 21.1 | 44.4 | 14.3 | 28.6 | 40.0 | 100.0 |
| DEX0488_027.nt.1 | 41955 | 31.6 | 60.0 | 21.4 | 42.9 | 60.0 | 100.0 |
| DEX0488_027.nt.1 | 41955.1 | 31.6 | 50.0 | 21.4 | 33.3 | 60.0 | 100.0 |
| DEX0488_027.nt.1 | 41955.2 | 36.8 | 53.8 | 21.4 | 33.3 | 80.0 | 100.0 |
| DEX0488_027.nt.1 | 41955.3 | 36.8 | 53.8 | 21.4 | 33.3 | 80.0 | 100.0 |
| DEX0488_027.nt.1 | 41955.4 | 31.6 | 54.5 | 21.4 | 37.5 | 60.0 | 100.0 |
| DEX0488_027.nt.1 | 41956 | 31.6 | 50.0 | 21.4 | 33.3 | 60.0 | 100.0 |
| DEX0488_027.nt.1 | 41956.1 | 31.6 | 66.7 | 14.3 | 40.0 | 80.0 | 100.0 |
| DEX0488_027.nt.1 | 41956.2 | 36.8 | 58.3 | 28.6 | 44.4 | 60.0 | 100.0 |
| DEX0488_027.nt.1 | 41956.3 | 26.3 | 55.6 | 14.3 | 33.3 | 60.0 | 100.0 |
| DEX0488_027.nt.1 | 41956.4 | 31.6 | 50.0 | 21.4 | 33.3 | 60.0 | 100.0 |
| DEX0488_027.nt.2 | 17852 | 42.1 | 61.5 | 28.6 | 44.4 | 80.0 | 100.0 |
| DEX0488_027.nt.2 | 17852.1 | 47.4 | 69.2 | 35.7 | 55.6 | 80.0 | 100.0 |
| DEX0488_027.nt.2 | 17853 | 21.1 | 44.4 | 14.3 | 28.6 | 40.0 | 100.0 |
| DEX0488_027.nt.2 | 17853.1 | 21.1 | 50.0 | 14.3 | 33.3 | 40.0 | 100.0 |
| DEX0488_027.nt.2 | 18644 | 42.1 | 61.5 | 28.6 | 44.4 | 80.0 | 100.0 |
| DEX0488_027.nt.2 | 18644.1 | 42.1 | 66.7 | 28.6 | 50.0 | 80.0 | 100.0 |
| DEX0488_027.nt.2 | 18644.2 | 31.6 | 60.0 | 21.4 | 42.9 | 60.0 | 100.0 |
| DEX0488_027.nt.2 | 18644.3 | 42.1 | 66.7 | 35.7 | 55.6 | 60.0 | 100.0 |
| DEX0488_027.nt.2 | 18645 | 31.6 | 60.0 | 21.4 | 42.9 | 60.0 | 100.0 |
| DEX0488_027.nt.2 | 18645.1 | 31.6 | 60.0 | 21.4 | 42.9 | 60.0 | 100.0 |
| DEX0488_027.nt.2 | 18645.2 | 31.6 | 66.7 | 21.4 | 50.0 | 60.0 | 100.0 |
| DEX0488_027.nt.2 | 18645.3 | 21.1 | 44.4 | 14.3 | 28.6 | 40.0 | 100.0 |
| DEX0488_027.nt.3 | 17852 | 42.1 | 61.5 | 28.6 | 44.4 | 80.0 | 100.0 |
| DEX0488_027.nt.3 | 17852.1 | 47.4 | 69.2 | 35.7 | 55.6 | 80.0 | 100.0 |
| DEX0488_027.nt.3 | 17853 | 21.1 | 44.4 | 14.3 | 28.6 | 40.0 | 100.0 |
| DEX0488_027.nt.3 | 17853.1 | 21.1 | 50.0 | 14.3 | 33.3 | 40.0 | 100.0 |
| DEX0488_027.nt.3 | 18644 | 42.1 | 61.5 | 28.6 | 44.4 | 80.0 | 100.0 |
| DEX0488_027.nt.3 | 18644.1 | 42.1 | 66.7 | 28.6 | 50.0 | 80.0 | 100.0 |
| DEX0488_027.nt.3 | 18644.2 | 31.6 | 60.0 | 21.4 | 42.9 | 60.0 | 100.0 |
| DEX0488_027.nt.3 | 18644.3 | 42.1 | 66.7 | 35.7 | 55.6 | 60.0 | 100.0 |
| DEX0488_027.nt.3 | 18645 | 31.6 | 60.0 | 21.4 | 42.9 | 60.0 | 100.0 |
| DEX0488_027.nt.3 | 18645.1 | 31.6 | 60.0 | 21.4 | 42.9 | 60.0 | 100.0 |
| DEX0488_027.nt.3 | 18645.2 | 31.6 | 66.7 | 21.4 | 50.0 | 60.0 | 100.0 |
| DEX0488_027.nt.3 | 18645.3 | 21.1 | 44.4 | 14.3 | 28.6 | 40.0 | 100.0 |
| DEX0488_027.nt.4 | 17852 | 42.1 | 61.5 | 28.6 | 44.4 | 80.0 | 100.0 |
| DEX0488_027.nt.4 | 17852.1 | 47.4 | 69.2 | 35.7 | 55.6 | 80.0 | 100.0 |
| DEX0488_027.nt.4 | 17853 | 21.1 | 44.4 | 14.3 | 28.6 | 40.0 | 100.0 |
| DEX0488_027.nt.4 | 17853.1 | 21.1 | 50.0 | 14.3 | 33.3 | 40.0 | 100.0 |
| DEX0488_027.nt.4 | 18644 | 42.1 | 61.5 | 28.6 | 44.4 | 80.0 | 100.0 |
| DEX0488_027.nt.4 | 18644.1 | 42.1 | 66.7 | 28.6 | 50.0 | 80.0 | 100.0 |
| DEX0488_027.nt.4 | 18644.2 | 31.6 | 60.0 | 21.4 | 42.9 | 60.0 | 100.0 |
| DEX0488_027.nt.4 | 18644.3 | 42.1 | 66.7 | 35.7 | 55.6 | 60.0 | 100.0 |
| DEX0488_027.nt.4 | 18645 | 31.6 | 60.0 | 21.4 | 42.9 | 60.0 | 100.0 |
| DEX0488_027.nt.4 | 18645.1 | 31.6 | 60.0 | 21.4 | 42.9 | 60.0 | 100.0 |
| DEX0488_027.nt.4 | 18645.2 | 31.6 | 66.7 | 21.4 | 50.0 | 60.0 | 100.0 |
| DEX0488_027.nt.4 | 18645.3 | 21.1 | 44.4 | 14.3 | 28.6 | 40.0 | 100.0 |
| DEX0488_028.nt.1 | 33088 | 52.6 | 66.7 | 35.7 | 50.0 | 100.0 | 100.0 |
| DEX0488_028.nt.1 | 33088.1 | 47.4 | 64.3 | 35.7 | 50.0 | 80.0 | 100.0 |
| DEX0488_028.nt.1 | 33088.2 | 57.9 | 73.3 | 42.9 | 60.0 | 100.0 | 100.0 |
| DEX0488_028.nt.1 | 33088.3 | 52.6 | 71.4 | 42.9 | 60.0 | 80.0 | 100.0 |
| DEX0488_029.nt.1 | 79635 | 42.1 | 42.1 | 42.9 | 42.9 | 40.0 | 40.0 |
| DEX0488_029.nt.1 | 79635.1 | 42.1 | 42.1 | 42.9 | 42.9 | 40.0 | 40.0 |
| DEX0488_030.nt.1 | 35317 | 31.6 | 42.9 | 14.3 | 20.0 | 80.0 | 100.0 |
| DEX0488_030.nt.1 | 35317.1 | 31.6 | 35.3 | 14.3 | 15.4 | 80.0 | 100.0 |
| DEX0488_031.nt.1 | 78587 | 15.8 | 15.8 | 21.4 | 21.4 | 0.0 | 0.0 |
| DEX0488_031.nt.1 | 78587.1 | 21.1 | 21.1 | 28.6 | 28.6 | 0.0 | 0.0 |
| DEX0488_031.nt.1 | 78588 | 26.3 | 26.3 | 35.7 | 35.7 | 0.0 | 0.0 |
| DEX0488_031.nt.1 | 78588.1 | 26.3 | 26.3 | 35.7 | 35.7 | 0.0 | 0.0 |
| DEX0488_032.nt.1 | 78711 | 0.0 | 0.0 | 0.0 | 0.0 | 0.0 | 0.0 |
| DEX0488_032.nt.1 | 78711.1 | 0.0 | 0.0 | 0.0 | 0.0 | 0.0 | 0.0 |
| DEX0488_032.nt.1 | 78712 | 5.3 | 5.3 | 7.1 | 7.1 | 0.0 | 0.0 |
| DEX0488_032.nt.1 | 78712.1 | 0.0 | 0.0 | 0.0 | 0.0 | 0.0 | 0.0 |
| DEX0488_033.nt.1 | 79019 | 0.0 | 0.0 | 0.0 | 0.0 | 0.0 | 0.0 |
| DEX0488_033.nt.1 | 79019.1 | 0.0 | 0.0 | 0.0 | 0.0 | 0.0 | 0.0 |
| DEX0488_033.nt.1 | 79020 | 0.0 | 0.0 | 0.0 | 0.0 | 0.0 | 0.0 |
| DEX0488_033.nt.1 | 79020.1 | 0.0 | 0.0 | 0.0 | 0.0 | 0.0 | 0.0 |
| DEX0488_033.nt.2 | 79019 | 0.0 | 0.0 | 0.0 | 0.0 | 0.0 | 0.0 |
| DEX0488_033.nt.2 | 79019.1 | 0.0 | 0.0 | 0.0 | 0.0 | 0.0 | 0.0 |
| DEX0488_033.nt.2 | 79020 | 0.0 | 0.0 | 0.0 | 0.0 | 0.0 | 0.0 |
| DEX0488_033.nt.2 | 79020.1 | 0.0 | 0.0 | 0.0 | 0.0 | 0.0 | 0.0 |
| DEX0488_034.nt.1 | 90123 | 5.3 | 20.0 | 7.1 | 25.0 | 0.0 | 0.0 |
| DEX0488_034.nt.1 | 90123.1 | 5.3 | 20.0 | 7.1 | 25.0 | 0.0 | 0.0 |
| DEX0488_034.nt.1 | 90124 | 5.3 | 12.5 | 7.1 | 16.7 | 0.0 | 0.0 |
| DEX0488_034.nt.1 | 90124.1 | 5.3 | 20.0 | 7.1 | 25.0 | 0.0 | 0.0 |
| DEX0488_035.nt.1 | 79903 | 10.5 | 11.1 | 7.1 | 7.1 | 20.0 | 25.0 |
| DEX0488_035.nt.1 | 79903.1 | 10.5 | 11.1 | 14.3 | 14.3 | 0.0 | 0.0 |
| DEX0488_035.nt.1 | 79904 | 15.8 | 21.4 | 14.3 | 20.0 | 20.0 | 25.0 |
| DEX0488_035.nt.1 | 79904.1 | 15.8 | 20.0 | 14.3 | 16.7 | 20.0 | 33.3 |
| DEX0488_035.nt.2 | 79903 | 10.5 | 11.1 | 7.1 | 7.1 | 20.0 | 25.0 |
| DEX0488_035.nt.2 | 79903.1 | 10.5 | 11.1 | 14.3 | 14.3 | 0.0 | 0.0 |
| DEX0488_035.nt.2 | 79904 | 15.8 | 21.4 | 14.3 | 20.0 | 20.0 | 25.0 |
| DEX0488_035.nt.2 | 79904.1 | 15.8 | 20.0 | 14.3 | 16.7 | 20.0 | 33.3 |
| DEX0488_036.nt.1 | 3976 | 5.3 | 7.7 | 0.0 | 0.0 | 20.0 | 25.0 |
| DEX0488_036.nt.1 | 3976.1 | 15.8 | 15.8 | 7.1 | 7.1 | 40.0 | 40.0 |
| DEX0488_036.nt.1 | 3977 | 10.5 | 11.1 | 7.1 | 7.1 | 20.0 | 25.0 |
| DEX0488_036.nt.1 | 3977.1 | 10.5 | 11.8 | 7.1 | 7.7 | 20.0 | 25.0 |
| DEX0488_036.nt.2 | 3976 | 5.3 | 7.7 | 0.0 | 0.0 | 20.0 | 25.0 |
| DEX0488_036.nt.2 | 3976.1 | 15.8 | 15.8 | 7.1 | 7.1 | 40.0 | 40.0 |
| DEX0488_036.nt.2 | 3977 | 10.5 | 11.1 | 7.1 | 7.1 | 20.0 | 25.0 |
| DEX0488_036.nt.2 | 3977.1 | 10.5 | 11.8 | 7.1 | 7.7 | 20.0 | 25.0 |

[0491] TABLE 4

| | | Ovr | Ovr | Ovr | Ovr | Ovr | Ovr |
|---|---|---|---|---|---|---|---|
| | | Multi-cancer | Multi-cancer | Multi-cancer | Multi-cancer | Multi-cancer | Multi-cancer |
| | | 550 ALL | 550 ALL | 550 INV | 550 INV | 550 LMP | 550 LMP |
| | Oligo | % up | % valid up | % up | % valid up | % up | % valid up |
| DEX ID | Name | n = 19 | n = 19 | n = 14 | n = 14 | n = 5 | n = 5 |
| DEX0488_001.nt.1 | 79931 | 36.8 | 36.8 | 35.7 | 35.7 | 40.0 | 40.0 |
| DEX0488_001.nt.1 | 79931.1 | 36.8 | 36.8 | 35.7 | 35.7 | 40.0 | 40.0 |
| DEX0488_001.nt.1 | 79932 | 52.6 | 52.6 | 50.0 | 50.0 | 60.0 | 60.0 |
| DEX0488_001.nt.1 | 79932.1 | 47.4 | 47.4 | 42.9 | 42.9 | 60.0 | 60.0 |
| DEX0488_001.nt.10 | 79931 | 36.8 | 36.8 | 35.7 | 35.7 | 40.0 | 40.0 |
| DEX0488_001.nt.10 | 79931.1 | 36.8 | 36.8 | 35.7 | 35.7 | 40.0 | 40.0 |
| DEX0488_001.nt.10 | 79932 | 52.6 | 52.6 | 50.0 | 50.0 | 60.0 | 60.0 |
| DEX0488_001.nt.10 | 79932.1 | 47.4 | 47.4 | 42.9 | 42.9 | 60.0 | 60.0 |
| DEX0488_001.nt.11 | 79931 | 36.8 | 36.8 | 35.7 | 35.7 | 40.0 | 40.0 |
| DEX0488_001.nt.11 | 79931.1 | 36.8 | 36.8 | 35.7 | 35.7 | 40.0 | 40.0 |
| DEX0488_001.nt.11 | 79932 | 52.6 | 52.6 | 50.0 | 50.0 | 60.0 | 60.0 |
| DEX0488_001.nt.11 | 79932.1 | 47.4 | 47.4 | 42.9 | 42.9 | 60.0 | 60.0 |
| DEX0488_001.nt.2 | 79931 | 36.8 | 36.8 | 35.7 | 35.7 | 40.0 | 40.0 |
| DEX0488_001.nt.2 | 79931.1 | 36.8 | 36.8 | 35.7 | 35.7 | 40.0 | 40.0 |
| DEX0488_001.nt.2 | 79932 | 52.6 | 52.6 | 50.0 | 50.0 | 60.0 | 60.0 |
| DEX0488_001.nt.2 | 79932.1 | 47.4 | 47.4 | 42.9 | 42.9 | 60.0 | 60.0 |
| DEX0488_001.nt.3 | 79931 | 36.8 | 36.8 | 35.7 | 35.7 | 40.0 | 40.0 |
| DEX0488_001.nt.3 | 79931.1 | 36.8 | 36.8 | 35.7 | 35.7 | 40.0 | 40.0 |
| DEX0488_001.nt.3 | 79932 | 52.6 | 52.6 | 50.0 | 50.0 | 60.0 | 60.0 |
| DEX0488_001.nt.3 | 79932.1 | 47.4 | 47.4 | 42.9 | 42.9 | 60.0 | 60.0 |
| DEX0488_001.nt.4 | 79931 | 36.8 | 36.8 | 35.7 | 35.7 | 40.0 | 40.0 |
| DEX0488_001.nt.4 | 79931.1 | 36.8 | 36.8 | 35.7 | 35.7 | 40.0 | 40.0 |
| DEX0488_001.nt.4 | 79932 | 52.6 | 52.6 | 50.0 | 50.0 | 60.0 | 60.0 |
| DEX0488_001.nt.4 | 79932.1 | 47.4 | 47.4 | 42.9 | 42.9 | 60.0 | 60.0 |
| DEX0488_001.nt.5 | 79931 | 36.8 | 36.8 | 35.7 | 35.7 | 40.0 | 40.0 |
| DEX0488_001.nt.5 | 79931.1 | 36.8 | 36.8 | 35.7 | 35.7 | 40.0 | 40.0 |
| DEX0488_001.nt.5 | 79932 | 52.6 | 52.6 | 50.0 | 50.0 | 60.0 | 60.0 |
| DEX0488_001.nt.5 | 79932.1 | 47.4 | 47.4 | 42.9 | 42.9 | 60.0 | 60.0 |
| DEX0488_001.nt.6 | 79931 | 36.8 | 36.8 | 35.7 | 35.7 | 40.0 | 40.0 |
| DEX0488_001.nt.6 | 79931.1 | 36.8 | 36.8 | 35.7 | 35.7 | 40.0 | 40.0 |
| DEX0488_001.nt.6 | 79932 | 52.6 | 52.6 | 50.0 | 50.0 | 60.0 | 60.0 |
| DEX0488_001.nt.6 | 79932.1 | 47.4 | 47.4 | 42.9 | 42.9 | 60.0 | 60.0 |
| DEX0488_001.nt.7 | 79931 | 36.8 | 36.8 | 35.7 | 35.7 | 40.0 | 40.0 |
| DEX0488_001.nt.7 | 79931.1 | 36.8 | 36.8 | 35.7 | 35.7 | 40.0 | 40.0 |
| DEX0488_001.nt.7 | 79932 | 52.6 | 52.6 | 50.0 | 50.0 | 60.0 | 60.0 |
| DEX0488_001.nt.7 | 79932.1 | 47.4 | 47.4 | 42.9 | 42.9 | 60.0 | 60.0 |
| DEX0488_001.nt.8 | 79931 | 36.8 | 36.8 | 35.7 | 35.7 | 40.0 | 40.0 |
| DEX0488_001.nt.8 | 79931.1 | 36.8 | 36.8 | 35.7 | 35.7 | 40.0 | 40.0 |
| DEX0488_001.nt.8 | 79932 | 52.6 | 52.6 | 50.0 | 50.0 | 60.0 | 60.0 |
| DEX0488_001.nt.8 | 79932.1 | 47.4 | 47.4 | 42.9 | 42.9 | 60.0 | 60.0 |
| DEX0488_001.nt.9 | 79931 | 36.8 | 36.8 | 35.7 | 35.7 | 40.0 | 40.0 |
| DEX0488_001.nt.9 | 79931.1 | 36.8 | 36.8 | 35.7 | 35.7 | 40.0 | 40.0 |
| DEX0488_001.nt.9 | 79932 | 52.6 | 52.6 | 50.0 | 50.0 | 60.0 | 60.0 |
| DEX0488_001.nt.9 | 79932.1 | 47.4 | 47.4 | 42.9 | 42.9 | 60.0 | 60.0 |
| DEX0488_002.nt.1 | 91111 | 0.0 | 0.0 | 0.0 | 0.0 | 0.0 | 0.0 |
| DEX0488_002.nt.1 | 91111.1 | 0.0 | 0.0 | 0.0 | 0.0 | 0.0 | 0.0 |
| DEX0488_002.nt.1 | 91112 | 0.0 | 0.0 | 0.0 | 0.0 | 0.0 | 0.0 |
| DEX0488_002.nt.1 | 91112.1 | 0.0 | 0.0 | 0.0 | 0.0 | 0.0 | 0.0 |
| DEX0488_003.nt.1 | 27921 | 0.0 | 0.0 | 0.0 | 0.0 | 0.0 | 0.0 |
| DEX0488_003.nt.1 | 27921.1 | 0.0 | 0.0 | 0.0 | 0.0 | 0.0 | 0.0 |
| DEX0488_003.nt.1 | 27922 | 0.0 | 0.0 | 0.0 | 0.0 | 0.0 | 0.0 |
| DEX0488_003.nt.1 | 27922.1 | 0.0 | 0.0 | 0.0 | 0.0 | 0.0 | 0.0 |
| DEX0488_003.nt.1 | 78855 | 15.8 | 15.8 | 7.1 | 7.1 | 40.0 | 40.0 |
| DEX0488_003.nt.1 | 78855.1 | 15.8 | 15.8 | 7.1 | 7.1 | 40.0 | 40.0 |
| DEX0488_003.nt.1 | 78856 | 15.8 | 15.8 | 7.1 | 7.1 | 40.0 | 40.0 |
| DEX0488_003.nt.1 | 78856.1 | 15.8 | 15.8 | 7.1 | 7.1 | 40.0 | 40.0 |
| DEX0488_003.nt.2 | 27921 | 0.0 | 0.0 | 0.0 | 0.0 | 0.0 | 0.0 |
| DEX0488_003.nt.2 | 27921.1 | 0.0 | 0.0 | 0.0 | 0.0 | 0.0 | 0.0 |
| DEX0488_003.nt.2 | 27922 | 0.0 | 0.0 | 0.0 | 0.0 | 0.0 | 0.0 |
| DEX0488_003.nt.2 | 27922.1 | 0.0 | 0.0 | 0.0 | 0.0 | 0.0 | 0.0 |
| DEX0488_003.nt.2 | 78855 | 15.8 | 15.8 | 7.1 | 7.1 | 40.0 | 40.0 |
| DEX0488_003.nt.2 | 78855.1 | 15.8 | 15.8 | 7.1 | 7.1 | 40.0 | 40.0 |
| DEX0488_003.nt.2 | 78856 | 15.8 | 15.8 | 7.1 | 7.1 | 40.0 | 40.0 |
| DEX0488_003.nt.2 | 78856.1 | 15.8 | 15.8 | 7.1 | 7.1 | 40.0 | 40.0 |
| DEX0488_003.nt.3 | 27921 | 0.0 | 0.0 | 0.0 | 0.0 | 0.0 | 0.0 |
| DEX0488_003.nt.3 | 27921.1 | 0.0 | 0.0 | 0.0 | 0.0 | 0.0 | 0.0 |
| DEX0488_003.nt.3 | 27922 | 0.0 | 0.0 | 0.0 | 0.0 | 0.0 | 0.0 |
| DEX0488_003.nt.3 | 27922.1 | 0.0 | 0.0 | 0.0 | 0.0 | 0.0 | 0.0 |
| DEX0488_003.nt.3 | 78855 | 15.8 | 15.8 | 7.1 | 7.1 | 40.0 | 40.0 |
| DEX0488_003.nt.3 | 78855.1 | 15.8 | 15.8 | 7.1 | 7.1 | 40.0 | 40.0 |
| DEX0488_003.nt.3 | 78856 | 15.8 | 15.8 | 7.1 | 7.1 | 40.0 | 40.0 |
| DEX0488_003.nt.3 | 78856.1 | 15.8 | 15.8 | 7.1 | 7.1 | 40.0 | 40.0 |
| DEX0488_003.nt.4 | 27921 | 0.0 | 0.0 | 0.0 | 0.0 | 0.0 | 0.0 |
| DEX0488_003.nt.4 | 27921.1 | 0.0 | 0.0 | 0.0 | 0.0 | 0.0 | 0.0 |
| DEX0488_003.nt.4 | 27922 | 0.0 | 0.0 | 0.0 | 0.0 | 0.0 | 0.0 |
| DEX0488_003.nt.4 | 27922.1 | 0.0 | 0.0 | 0.0 | 0.0 | 0.0 | 0.0 |
| DEX0488_003.nt.4 | 78855 | 15.8 | 15.8 | 7.1 | 7.1 | 40.0 | 40.0 |
| DEX0488_003.nt.4 | 78855.1 | 15.8 | 15.8 | 7.1 | 7.1 | 40.0 | 40.0 |
| DEX0488_003.nt.4 | 78856 | 15.8 | 15.8 | 7.1 | 7.1 | 40.0 | 40.0 |
| DEX0488_003.nt.4 | 78856.1 | 15.8 | 15.8 | 7.1 | 7.1 | 40.0 | 40.0 |
| DEX0488_003.nt.5 | 27921 | 0.0 | 0.0 | 0.0 | 0.0 | 0.0 | 0.0 |
| DEX0488_003.nt.5 | 27921.1 | 0.0 | 0.0 | 0.0 | 0.0 | 0.0 | 0.0 |
| DEX0488_003.nt.5 | 27922 | 0.0 | 0.0 | 0.0 | 0.0 | 0.0 | 0.0 |
| DEX0488_003.nt.5 | 27922.1 | 0.0 | 0.0 | 0.0 | 0.0 | 0.0 | 0.0 |
| DEX0488_003.nt.5 | 78855 | 15.8 | 15.8 | 7.1 | 7.1 | 40.0 | 40.0 |
| DEX0488_003.nt.5 | 78855.1 | 15.8 | 15.8 | 7.1 | 7.1 | 40.0 | 40.0 |
| DEX0488_003.nt.5 | 78856 | 15.8 | 15.8 | 7.1 | 7.1 | 40.0 | 40.0 |
| DEX0488_003.nt.5 | 78856.1 | 15.8 | 15.8 | 7.1 | 7.1 | 40.0 | 40.0 |
| DEX0488_003.nt.6 | 27921 | 0.0 | 0.0 | 0.0 | 0.0 | 0.0 | 0.0 |
| DEX0488_003.nt.6 | 27921.1 | 0.0 | 0.0 | 0.0 | 0.0 | 0.0 | 0.0 |
| DEX0488_003.nt.6 | 27922 | 0.0 | 0.0 | 0.0 | 0.0 | 0.0 | 0.0 |
| DEX0488_003.nt.6 | 27922.1 | 0.0 | 0.0 | 0.0 | 0.0 | 0.0 | 0.0 |
| DEX0488_003.nt.6 | 78855 | 15.8 | 15.8 | 7.1 | 7.1 | 40.0 | 40.0 |
| DEX0488_003.nt.6 | 78855.1 | 15.8 | 15.8 | 7.1 | 7.1 | 40.0 | 40.0 |
| DEX0488_003.nt.6 | 78856 | 15.8 | 15.8 | 7.1 | 7.1 | 40.0 | 40.0 |
| DEX0488_003.nt.6 | 78856.1 | 15.8 | 15.8 | 7.1 | 7.1 | 40.0 | 40.0 |
| DEX0488_003.nt.7 | 78855 | 15.8 | 15.8 | 7.1 | 7.1 | 40.0 | 40.0 |
| DEX0488_003.nt.7 | 78855.1 | 15.8 | 15.8 | 7.1 | 7.1 | 40.0 | 40.0 |
| DEX0488_003.nt.7 | 78856 | 15.8 | 15.8 | 7.1 | 7.1 | 40.0 | 40.0 |
| DEX0488_003.nt.7 | 78856.1 | 15.8 | 15.8 | 7.1 | 7.1 | 40.0 | 40.0 |
| DEX0488_004.nt.1 | 10666 | 10.5 | 20.0 | 0.0 | 0.0 | 40.0 | 100.0 |
| DEX0488_004.nt.1 | 10666.1 | 5.3 | 12.5 | 0.0 | 0.0 | 20.0 | 100.0 |
| DEX0488_004.nt.1 | 10667 | 21.1 | 33.3 | 7.1 | 12.5 | 60.0 | 75.0 |
| DEX0488_004.nt.1 | 10667.1 | 21.1 | 36.4 | 7.1 | 14.3 | 60.0 | 75.0 |
| DEX0488_005.nt.1 | 9744 | 47.4 | 50.0 | 57.1 | 57.1 | 20.0 | 25.0 |
| DEX0488_005.nt.1 | 9744.1 | 42.1 | 44.4 | 50.0 | 50.0 | 20.0 | 25.0 |
| DEX0488_005.nt.1 | 9745 | 47.4 | 50.0 | 57.1 | 57.1 | 20.0 | 25.0 |
| DEX0488_005.nt.1 | 9745.1 | 47.4 | 56.2 | 57.1 | 66.7 | 20.0 | 25.0 |
| DEX0488_006.nt.1 | 4353 | 31.6 | 31.6 | 28.6 | 28.6 | 40.0 | 40.0 |
| DEX0488_006.nt.1 | 4353.1 | 31.6 | 31.6 | 28.6 | 28.6 | 40.0 | 40.0 |
| DEX0488_006.nt.1 | 5804 | 31.6 | 33.3 | 28.6 | 28.6 | 40.0 | 50.0 |
| DEX0488_006.nt.1 | 5804.1 | 31.6 | 35.3 | 28.6 | 28.6 | 40.0 | 66.7 |
| DEX0488_006.nt.1 | 5804.2 | 31.6 | 33.3 | 28.6 | 28.6 | 40.0 | 50.0 |
| DEX0488_006.nt.1 | 92287 | 31.6 | 35.3 | 28.6 | 28.6 | 40.0 | 66.7 |
| DEX0488_006.nt.1 | 92287.1 | 31.6 | 37.5 | 28.6 | 30.8 | 40.0 | 66.7 |
| DEX0488_007.nt.1 | 41955 | 31.6 | 85.7 | 21.4 | 75.0 | 60.0 | 100.0 |
| DEX0488_007.nt.1 | 41955.1 | 26.3 | 62.5 | 14.3 | 40.0 | 60.0 | 100.0 |
| DEX0488_007.nt.1 | 41955.2 | 26.3 | 62.5 | 14.3 | 40.0 | 60.0 | 100.0 |
| DEX0488_007.nt.1 | 41955.3 | 26.3 | 83.3 | 14.3 | 66.7 | 60.0 | 100.0 |
| DEX0488_007.nt.1 | 41955.4 | 26.3 | 62.5 | 14.3 | 40.0 | 60.0 | 100.0 |
| DEX0488_007.nt.1 | 41956 | 31.6 | 66.7 | 21.4 | 50.0 | 60.0 | 100.0 |
| DEX0488_007.nt.1 | 41956.1 | 26.3 | 100.0 | 14.3 | 100.0 | 60.0 | 100.0 |
| DEX0488_007.nt.1 | 41956.2 | 26.3 | 62.5 | 14.3 | 40.0 | 60.0 | 100.0 |
| DEX0488_007.nt.1 | 41956.3 | 21.1 | 57.1 | 7.1 | 25.0 | 60.0 | 100.0 |
| DEX0488_007.nt.1 | 41956.4 | 21.1 | 57.1 | 14.3 | 40.0 | 40.0 | 100.0 |
| DEX0488_008.nt.1 | 17292 | 52.6 | 55.6 | 35.7 | 38.5 | 100.0 | 100.0 |
| DEX0488_008.nt.1 | 17292.1 | 52.6 | 52.6 | 35.7 | 35.7 | 100.0 | 100.0 |
| DEX0488_008.nt.1 | 17293 | 57.9 | 61.1 | 42.9 | 46.2 | 100.0 | 100.0 |
| DEX0488_008.nt.1 | 17293.1 | 57.9 | 57.9 | 42.9 | 42.9 | 100.0 | 100.0 |
| DEX0488_008.nt.1 | 2085 | 47.4 | 47.4 | 28.6 | 28.6 | 100.0 | 100.0 |
| DEX0488_008.nt.1 | 24404 | 52.6 | 52.6 | 35.7 | 35.7 | 100.0 | 100.0 |
| DEX0488_008.nt.1 | 24404.1 | 52.6 | 52.6 | 35.7 | 35.7 | 100.0 | 100.0 |
| DEX0488_008.nt.1 | 24405 | 52.6 | 55.6 | 35.7 | 38.5 | 100.0 | 100.0 |
| DEX0488_008.nt.1 | 24405.1 | 52.6 | 55.6 | 35.7 | 38.5 | 100.0 | 100.0 |
| DEX0488_008.nt.1 | 4909 | 47.4 | 47.4 | 28.6 | 28.6 | 100.0 | 100.0 |
| DEX0488_008.nt.1 | 4909.1 | 52.6 | 52.6 | 35.7 | 35.7 | 100.0 | 100.0 |
| DEX0488_008.nt.1 | 4910 | 57.9 | 57.9 | 42.9 | 42.9 | 100.0 | 100.0 |
| DEX0488_008.nt.1 | 4910.1 | 52.6 | 52.6 | 35.7 | 35.7 | 100.0 | 100.0 |
| DEX0488_008.nt.2 | 17292 | 52.6 | 55.6 | 35.7 | 38.5 | 100.0 | 100.0 |
| DEX0488_008.nt.2 | 17292.1 | 52.6 | 52.6 | 35.7 | 35.7 | 100.0 | 100.0 |
| DEX0488_008.nt.2 | 17293 | 57.9 | 61.1 | 42.9 | 46.2 | 100.0 | 100.0 |
| DEX0488_008.nt.2 | 17293.1 | 57.9 | 57.9 | 42.9 | 42.9 | 100.0 | 100.0 |
| DEX0488_008.nt.2 | 2085 | 47.4 | 47.4 | 28.6 | 28.6 | 100.0 | 100.0 |
| DEX0488_008.nt.2 | 24404 | 52.6 | 52.6 | 35.7 | 35.7 | 100.0 | 100.0 |
| DEX0488_008.nt.2 | 24404.1 | 52.6 | 52.6 | 35.7 | 35.7 | 100.0 | 100.0 |
| DEX0488_008.nt.2 | 24405 | 52.6 | 55.6 | 35.7 | 38.5 | 100.0 | 100.0 |
| DEX0488_008.nt.2 | 24405.1 | 52.6 | 55.6 | 35.7 | 38.5 | 100.0 | 100.0 |
| DEX0488_008.nt.2 | 4909 | 47.4 | 47.4 | 28.6 | 28.6 | 100.0 | 100.0 |
| DEX0488_008.nt.2 | 4909.1 | 52.6 | 52.6 | 35.7 | 35.7 | 100.0 | 100.0 |
| DEX0488_008.nt.2 | 4910 | 57.9 | 57.9 | 42.9 | 42.9 | 100.0 | 100.0 |
| DEX0488_008.nt.2 | 4910.1 | 52.6 | 52.6 | 35.7 | 35.7 | 100.0 | 100.0 |
| DEX0488_009.nt.1 | 79339 | 0.0 | 0.0 | 0.0 | 0.0 | 0.0 | 0.0 |
| DEX0488_009.nt.1 | 79339.1 | 0.0 | 0.0 | 0.0 | 0.0 | 0.0 | 0.0 |
| DEX0488_010.nt.1 | 26770 | 42.1 | 80.0 | 28.6 | 66.7 | 80.0 | 100.0 |
| DEX0488_010.nt.1 | 26770.1 | 47.4 | 81.8 | 28.6 | 66.7 | 100.0 | 100.0 |
| DEX0488_011.nt.1 | 33840 | 47.4 | 52.9 | 57.1 | 61.5 | 20.0 | 25.0 |
| DEX0488_011.nt.1 | 33840.1 | 57.9 | 61.1 | 71.4 | 71.4 | 20.0 | 25.0 |
| DEX0488_011.nt.1 | 33841 | 57.9 | 68.8 | 64.3 | 75.0 | 40.0 | 50.0 |
| DEX0488_011.nt.1 | 33841.1 | 57.9 | 68.8 | 71.4 | 83.3 | 20.0 | 25.0 |
| DEX0488_011.nt.1 | 39927 | 63.2 | 66.7 | 71.4 | 71.4 | 40.0 | 50.0 |
| DEX0488_011.nt.1 | 39927.1 | 63.2 | 66.7 | 71.4 | 71.4 | 40.0 | 50.0 |
| DEX0488_011.nt.1 | 39927.2 | 57.9 | 61.1 | 71.4 | 71.4 | 20.0 | 25.0 |
| DEX0488_011.nt.1 | 39927.3 | 57.9 | 64.7 | 71.4 | 76.9 | 20.0 | 25.0 |
| DEX0488_011.nt.1 | 39927.4 | 57.9 | 64.7 | 71.4 | 76.9 | 20.0 | 25.0 |
| DEX0488_011.nt.1 | 39928 | 63.2 | 80.0 | 71.4 | 83.3 | 40.0 | 66.7 |
| DEX0488_011.nt.1 | 39928.1 | 47.4 | 64.3 | 57.1 | 66.7 | 20.0 | 50.0 |
| DEX0488_011.nt.1 | 39928.2 | 52.6 | 66.7 | 57.1 | 72.7 | 40.0 | 50.0 |
| DEX0488_011.nt.1 | 39928.3 | 57.9 | 78.6 | 71.4 | 83.3 | 20.0 | 50.0 |
| DEX0488_011.nt.1 | 39928.4 | 42.1 | 61.5 | 42.9 | 54.5 | 40.0 | 100.0 |
| DEX0488_012.nt.1 | 21187 | 5.3 | 9.1 | 7.1 | 12.5 | 0.0 | 0.0 |
| DEX0488_012.nt.1 | 21187.1 | 5.3 | 11.1 | 7.1 | 14.3 | 0.0 | 0.0 |
| DEX0488_012.nt.1 | 21188 | 0.0 | 0.0 | 0.0 | 0.0 | 0.0 | 0.0 |
| DEX0488_012.nt.1 | 21188.1 | 0.0 | 0.0 | 0.0 | 0.0 | 0.0 | 0.0 |
| DEX0488_012.nt.1 | 78927 | 26.3 | 35.7 | 21.4 | 27.3 | 40.0 | 66.7 |
| DEX0488_012.nt.1 | 78927.1 | 21.1 | 30.8 | 14.3 | 20.0 | 40.0 | 66.7 |
| DEX0488_013.nt.1 | 79955 | 5.3 | 6.2 | 7.1 | 7.7 | 0.0 | 0.0 |
| DEX0488_013.nt.1 | 79955.1 | 5.3 | 6.2 | 7.1 | 7.7 | 0.0 | 0.0 |
| DEX0488_013.nt.1 | 79956 | 10.5 | 13.3 | 14.3 | 15.4 | 0.0 | 0.0 |
| DEX0488_013.nt.1 | 79956.1 | 5.3 | 9.1 | 7.1 | 10.0 | 0.0 | 0.0 |
| DEX0488_013.nt.1 | 79959 | 31.6 | 40.0 | 42.9 | 50.0 | 0.0 | 0.0 |
| DEX0488_013.nt.1 | 79959.1 | 26.3 | 35.7 | 35.7 | 41.7 | 0.0 | 0.0 |
| DEX0488_013.nt.1 | 79960 | 15.8 | 20.0 | 21.4 | 23.1 | 0.0 | 0.0 |
| DEX0488_013.nt.1 | 79960.1 | 21.1 | 28.6 | 28.6 | 33.3 | 0.0 | 0.0 |
| DEX0488_013.nt.1 | 79963 | 5.3 | 7.1 | 7.1 | 8.3 | 0.0 | 0.0 |
| DEX0488_013.nt.1 | 79963.1 | 5.3 | 12.5 | 7.1 | 14.3 | 0.0 | 0.0 |
| DEX0488_013.nt.1 | 79964 | 5.3 | 7.7 | 7.1 | 9.1 | 0.0 | 0.0 |
| DEX0488_013.nt.1 | 79964.1 | 5.3 | 8.3 | 7.1 | 10.0 | 0.0 | 0.0 |
| DEX0488_013.nt.2 | 79959 | 31.6 | 40.0 | 42.9 | 50.0 | 0.0 | 0.0 |
| DEX0488_013.nt.2 | 79959.1 | 26.3 | 35.7 | 35.7 | 41.7 | 0.0 | 0.0 |
| DEX0488_013.nt.2 | 79960 | 15.8 | 20.0 | 21.4 | 23.1 | 0.0 | 0.0 |
| DEX0488_013.nt.2 | 79960.1 | 21.1 | 28.6 | 28.6 | 33.3 | 0.0 | 0.0 |
| DEX0488_014.nt.1 | 90171 | 5.3 | 5.9 | 7.1 | 7.7 | 0.0 | 0.0 |
| DEX0488_014.nt.1 | 90171.1 | 15.8 | 16.7 | 21.4 | 21.4 | 0.0 | 0.0 |
| DEX0488_014.nt.1 | 90172 | 15.8 | 25.0 | 21.4 | 30.0 | 0.0 | 0.0 |
| DEX0488_014.nt.1 | 90172.1 | 15.8 | 17.6 | 21.4 | 23.1 | 0.0 | 0.0 |
| DEX0488_014.nt.2 | 90171 | 5.3 | 5.9 | 7.1 | 7.7 | 0.0 | 0.0 |
| DEX0488_014.nt.2 | 90171.1 | 15.8 | 16.7 | 21.4 | 21.4 | 0.0 | 0.0 |
| DEX0488_014.nt.2 | 90172 | 15.8 | 25.0 | 21.4 | 30.0 | 0.0 | 0.0 |
| DEX0488_014.nt.2 | 90172.1 | 15.8 | 17.6 | 21.4 | 23.1 | 0.0 | 0.0 |
| DEX0488_014.nt.3 | 90171 | 5.3 | 5.9 | 7.1 | 7.7 | 0.0 | 0.0 |
| DEX0488_014.nt.3 | 90171.1 | 15.8 | 16.7 | 21.4 | 21.4 | 0.0 | 0.0 |
| DEX0488_014.nt.3 | 90172 | 15.8 | 25.0 | 21.4 | 30.0 | 0.0 | 0.0 |
| DEX0488_014.nt.3 | 90172.1 | 15.8 | 17.6 | 21.4 | 23.1 | 0.0 | 0.0 |
| DEX0488_014.nt.4 | 90171 | 5.3 | 5.9 | 7.1 | 7.7 | 0.0 | 0.0 |
| DEX0488_014.nt.4 | 90171.1 | 15.8 | 16.7 | 21.4 | 21.4 | 0.0 | 0.0 |
| DEX0488_014.nt.4 | 90172 | 15.8 | 25.0 | 21.4 | 30.0 | 0.0 | 0.0 |
| DEX0488_014.nt.4 | 90172.1 | 15.8 | 17.6 | 21.4 | 23.1 | 0.0 | 0.0 |
| DEX0488_015.nt.1 | 78631 | 10.5 | 40.0 | 7.1 | 25.0 | 20.0 | 100.0 |
| DEX0488_015.nt.1 | 78631.1 | 10.5 | 40.0 | 7.1 | 25.0 | 20.0 | 100.0 |
| DEX0488_015.nt.1 | 78632 | 5.3 | 12.5 | 7.1 | 14.3 | 0.0 | 0.0 |
| DEX0488_015.nt.1 | 78632.1 | 15.8 | 30.0 | 14.3 | 22.2 | 20.0 | 100.0 |
| DEX0488_015.nt.2 | 78631 | 10.5 | 40.0 | 7.1 | 25.0 | 20.0 | 100.0 |
| DEX0488_015.nt.2 | 78631.1 | 10.5 | 40.0 | 7.1 | 25.0 | 20.0 | 100.0 |
| DEX0488_015.nt.2 | 78632 | 5.3 | 12.5 | 7.1 | 14.3 | 0.0 | 0.0 |
| DEX0488_015.nt.2 | 78632.1 | 15.8 | 30.0 | 14.3 | 22.2 | 20.0 | 100.0 |
| DEX0488_016.nt.1 | 79660 | 10.5 | 33.3 | 14.3 | 40.0 | 0.0 | 0.0 |
| DEX0488_016.nt.1 | 79660.1 | 10.5 | 28.6 | 14.3 | 33.3 | 0.0 | 0.0 |
| DEX0488_016.nt.10 | 79659 | 0.0 | 0.0 | 0.0 | 0.0 | 0.0 | 0.0 |
| DEX0488_016.nt.10 | 79659.1 | 0.0 | 0.0 | 0.0 | 0.0 | 0.0 | 0.0 |
| DEX0488_016.nt.10 | 79660 | 10.5 | 33.3 | 14.3 | 40.0 | 0.0 | 0.0 |
| DEX0488_016.nt.10 | 79660.1 | 10.5 | 28.6 | 14.3 | 33.3 | 0.0 | 0.0 |
| DEX0488_016.nt.11 | 79659 | 0.0 | 0.0 | 0.0 | 0.0 | 0.0 | 0.0 |
| DEX0488_016.nt.11 | 79659.1 | 0.0 | 0.0 | 0.0 | 0.0 | 0.0 | 0.0 |
| DEX0488_016.nt.11 | 79660 | 10.5 | 33.3 | 14.3 | 40.0 | 0.0 | 0.0 |
| DEX0488_016.nt.11 | 79660.1 | 10.5 | 28.6 | 14.3 | 33.3 | 0.0 | 0.0 |
| DEX0488_016.nt.2 | 79660 | 10.5 | 33.3 | 14.3 | 40.0 | 0.0 | 0.0 |
| DEX0488_016.nt.2 | 79660.1 | 10.5 | 28.6 | 14.3 | 33.3 | 0.0 | 0.0 |
| DEX0488_016.nt.3 | 79660 | 10.5 | 33.3 | 14.3 | 40.0 | 0.0 | 0.0 |
| DEX0488_016.nt.3 | 79660.1 | 10.5 | 28.6 | 14.3 | 33.3 | 0.0 | 0.0 |
| DEX0488_016.nt.4 | 79660 | 10.5 | 33.3 | 14.3 | 40.0 | 0.0 | 0.0 |
| DEX0488_016.nt.4 | 79660.1 | 10.5 | 28.6 | 14.3 | 33.3 | 0.0 | 0.0 |
| DEX0488_016.nt.5 | 79660 | 10.5 | 33.3 | 14.3 | 40.0 | 0.0 | 0.0 |
| DEX0488_016.nt.5 | 79660.1 | 10.5 | 28.6 | 14.3 | 33.3 | 0.0 | 0.0 |
| DEX0488_016.nt.6 | 79660 | 10.5 | 33.3 | 14.3 | 40.0 | 0.0 | 0.0 |
| DEX0488_016.nt.6 | 79660.1 | 10.5 | 28.6 | 14.3 | 33.3 | 0.0 | 0.0 |
| DEX0488_016.nt.7 | 79660 | 10.5 | 33.3 | 14.3 | 40.0 | 0.0 | 0.0 |
| DEX0488_016.nt.7 | 79660.1 | 10.5 | 28.6 | 14.3 | 33.3 | 0.0 | 0.0 |
| DEX0488_016.nt.8 | 79660 | 10.5 | 33.3 | 14.3 | 40.0 | 0.0 | 0.0 |
| DEX0488_016.nt.8 | 79660.1 | 10.5 | 28.6 | 14.3 | 33.3 | 0.0 | 0.0 |
| DEX0488_016.nt.9 | 79660 | 10.5 | 33.3 | 14.3 | 40.0 | 0.0 | 0.0 |
| DEX0488_016.nt.9 | 79660.1 | 10.5 | 28.6 | 14.3 | 33.3 | 0.0 | 0.0 |
| DEX0488_017.nt.1 | 4353 | 31.6 | 31.6 | 28.6 | 28.6 | 40.0 | 40.0 |
| DEX0488_017.nt.1 | 4353.1 | 31.6 | 31.6 | 28.6 | 28.6 | 40.0 | 40.0 |
| DEX0488_017.nt.1 | 5804 | 31.6 | 33.3 | 28.6 | 28.6 | 40.0 | 50.0 |
| DEX0488_017.nt.1 | 5804.1 | 31.6 | 35.3 | 28.6 | 28.6 | 40.0 | 66.7 |
| DEX0488_017.nt.1 | 5804.2 | 31.6 | 33.3 | 28.6 | 28.6 | 40.0 | 50.0 |
| DEX0488_017.nt.1 | 92287 | 31.6 | 35.3 | 28.6 | 28.6 | 40.0 | 66.7 |
| DEX0488_017.nt.1 | 92287.1 | 31.6 | 37.5 | 28.6 | 30.8 | 40.0 | 66.7 |
| DEX0488_018.nt.1 | 79936 | 5.3 | 14.3 | 7.1 | 16.7 | 0.0 | 0.0 |
| DEX0488_018.nt.1 | 79936.1 | 10.5 | 28.6 | 14.3 | 33.3 | 0.0 | 0.0 |
| DEX0488_018.nt.1 | 79944 | 10.5 | 28.6 | 14.3 | 33.3 | 0.0 | 0.0 |
| DEX0488_018.nt.1 | 79944.1 | 10.5 | 28.6 | 14.3 | 33.3 | 0.0 | 0.0 |
| DEX0488_018.nt.2 | 79936 | 5.3 | 14.3 | 7.1 | 16.7 | 0.0 | 0.0 |
| DEX0488_018.nt.2 | 79936.1 | 10.5 | 28.6 | 14.3 | 33.3 | 0.0 | 0.0 |
| DEX0488_018.nt.2 | 79944 | 10.5 | 28.6 | 14.3 | 33.3 | 0.0 | 0.0 |
| DEX0488_018.nt.2 | 79944.1 | 10.5 | 28.6 | 14.3 | 33.3 | 0.0 | 0.0 |
| DEX0488_018.nt.3 | 79936 | 5.3 | 14.3 | 7.1 | 16.7 | 0.0 | 0.0 |
| DEX0488_018.nt.3 | 79936.1 | 10.5 | 28.6 | 14.3 | 33.3 | 0.0 | 0.0 |
| DEX0488_018.nt.3 | 79944 | 10.5 | 28.6 | 14.3 | 33.3 | 0.0 | 0.0 |
| DEX0488_018.nt.3 | 79944.1 | 10.5 | 28.6 | 14.3 | 33.3 | 0.0 | 0.0 |
| DEX0488_018.nt.4 | 79936 | 5.3 | 14.3 | 7.1 | 16.7 | 0.0 | 0.0 |
| DEX0488_018.nt.4 | 79936.1 | 10.5 | 28.6 | 14.3 | 33.3 | 0.0 | 0.0 |
| DEX0488_018.nt.4 | 79944 | 10.5 | 28.6 | 14.3 | 33.3 | 0.0 | 0.0 |
| DEX0488_018.nt.4 | 79944.1 | 10.5 | 28.6 | 14.3 | 33.3 | 0.0 | 0.0 |
| DEX0488_018.nt.5 | 79936 | 5.3 | 14.3 | 7.1 | 16.7 | 0.0 | 0.0 |
| DEX0488_018.nt.5 | 79936.1 | 10.5 | 28.6 | 14.3 | 33.3 | 0.0 | 0.0 |
| DEX0488_018.nt.5 | 79944 | 10.5 | 28.6 | 14.3 | 33.3 | 0.0 | 0.0 |
| DEX0488_018.nt.5 | 79944.1 | 10.5 | 28.6 | 14.3 | 33.3 | 0.0 | 0.0 |
| DEX0488_018.nt.6 | 79936 | 5.3 | 14.3 | 7.1 | 16.7 | 0.0 | 0.0 |
| DEX0488_018.nt.6 | 79936.1 | 10.5 | 28.6 | 14.3 | 33.3 | 0.0 | 0.0 |
| DEX0488_018.nt.6 | 79944 | 10.5 | 28.6 | 14.3 | 33.3 | 0.0 | 0.0 |
| DEX0488_018.nt.6 | 79944.1 | 10.5 | 28.6 | 14.3 | 33.3 | 0.0 | 0.0 |
| DEX0488_018.nt.7 | 79936 | 5.3 | 14.3 | 7.1 | 16.7 | 0.0 | 0.0 |
| DEX0488_018.nt.7 | 79936.1 | 10.5 | 28.6 | 14.3 | 33.3 | 0.0 | 0.0 |
| DEX0488_018.nt.7 | 79944 | 10.5 | 28.6 | 14.3 | 33.3 | 0.0 | 0.0 |
| DEX0488_018.nt.7 | 79944.1 | 10.5 | 28.6 | 14.3 | 33.3 | 0.0 | 0.0 |
| DEX0488_018.nt.8 | 79936 | 5.3 | 14.3 | 7.1 | 16.7 | 0.0 | 0.0 |
| DEX0488_018.nt.8 | 79936.1 | 10.5 | 28.6 | 14.3 | 33.3 | 0.0 | 0.0 |
| DEX0488_018.nt.8 | 79944 | 10.5 | 28.6 | 14.3 | 33.3 | 0.0 | 0.0 |
| DEX0488_018.nt.8 | 79944.1 | 10.5 | 28.6 | 14.3 | 33.3 | 0.0 | 0.0 |
| DEX0488_019.nt.1 | 79955 | 5.3 | 6.2 | 7.1 | 7.7 | 0.0 | 0.0 |
| DEX0488_019.nt.1 | 79955.1 | 5.3 | 6.2 | 7.1 | 7.7 | 0.0 | 0.0 |
| DEX0488_019.nt.1 | 79956 | 10.5 | 13.3 | 14.3 | 15.4 | 0.0 | 0.0 |
| DEX0488_019.nt.1 | 79956.1 | 5.3 | 9.1 | 7.1 | 10.0 | 0.0 | 0.0 |
| DEX0488_019.nt.1 | 79959 | 31.6 | 40.0 | 42.9 | 50.0 | 0.0 | 0.0 |
| DEX0488_019.nt.1 | 79959.1 | 26.3 | 35.7 | 35.7 | 41.7 | 0.0 | 0.0 |
| DEX0488_019.nt.1 | 79960 | 15.8 | 20.0 | 21.4 | 23.1 | 0.0 | 0.0 |
| DEX0488_019.nt.1 | 79960.1 | 21.1 | 28.6 | 28.6 | 33.3 | 0.0 | 0.0 |
| DEX0488_019.nt.1 | 79963 | 5.3 | 7.1 | 7.1 | 8.3 | 0.0 | 0.0 |
| DEX0488_019.nt.1 | 79963.1 | 5.3 | 12.5 | 7.1 | 14.3 | 0.0 | 0.0 |
| DEX0488_019.nt.1 | 79964 | 5.3 | 7.7 | 7.1 | 9.1 | 0.0 | 0.0 |
| DEX0488_019.nt.1 | 79964.1 | 5.3 | 8.3 | 7.1 | 10.0 | 0.0 | 0.0 |
| DEX0488_019.nt.2 | 79955 | 5.3 | 6.2 | 7.1 | 7.7 | 0.0 | 0.0 |
| DEX0488_019.nt.2 | 79955.1 | 5.3 | 6.2 | 7.1 | 7.7 | 0.0 | 0.0 |
| DEX0488_019.nt.2 | 79956 | 10.5 | 13.3 | 14.3 | 15.4 | 0.0 | 0.0 |
| DEX0488_019.nt.2 | 79956.1 | 5.3 | 9.1 | 7.1 | 10.0 | 0.0 | 0.0 |
| DEX0488_019.nt.2 | 79959 | 31.6 | 40.0 | 42.9 | 50.0 | 0.0 | 0.0 |
| DEX0488_019.nt.2 | 79959.1 | 26.3 | 35.7 | 35.7 | 41.7 | 0.0 | 0.0 |
| DEX0488_019.nt.2 | 79960 | 15.8 | 20.0 | 21.4 | 23.1 | 0.0 | 0.0 |
| DEX0488_019.nt.2 | 79960.1 | 21.1 | 28.6 | 28.6 | 33.3 | 0.0 | 0.0 |
| DEX0488_019.nt.2 | 79963 | 5.3 | 7.1 | 7.1 | 8.3 | 0.0 | 0.0 |
| DEX0488_019.nt.2 | 79963.1 | 5.3 | 12.5 | 7.1 | 14.3 | 0.0 | 0.0 |
| DEX0488_019.nt.2 | 79964 | 5.3 | 7.7 | 7.1 | 9.1 | 0.0 | 0.0 |
| DEX0488_019.nt.2 | 79964.1 | 5.3 | 8.3 | 7.1 | 10.0 | 0.0 | 0.0 |
| DEX0488_019.nt.3 | 79955 | 5.3 | 6.2 | 7.1 | 7.7 | 0.0 | 0.0 |
| DEX0488_019.nt.3 | 79955.1 | 5.3 | 6.2 | 7.1 | 7.7 | 0.0 | 0.0 |
| DEX0488_019.nt.3 | 79956 | 10.5 | 13.3 | 14.3 | 15.4 | 0.0 | 0.0 |
| DEX0488_019.nt.3 | 79956.1 | 5.3 | 9.1 | 7.1 | 10.0 | 0.0 | 0.0 |
| DEX0488_019.nt.3 | 79959 | 31.6 | 40.0 | 42.9 | 50.0 | 0.0 | 0.0 |
| DEX0488_019.nt.3 | 79959.1 | 26.3 | 35.7 | 35.7 | 41.7 | 0.0 | 0.0 |
| DEX0488_019.nt.3 | 79960 | 15.8 | 20.0 | 21.4 | 23.1 | 0.0 | 0.0 |
| DEX0488_019.nt.3 | 79960.1 | 21.1 | 28.6 | 28.6 | 33.3 | 0.0 | 0.0 |
| DEX0488_019.nt.3 | 79963 | 5.3 | 7.1 | 7.1 | 8.3 | 0.0 | 0.0 |
| DEX0488_019.nt.3 | 79963.1 | 5.3 | 12.5 | 7.1 | 14.3 | 0.0 | 0.0 |
| DEX0488_019.nt.3 | 79964 | 5.3 | 7.7 | 7.1 | 9.1 | 0.0 | 0.0 |
| DEX0488_019.nt.3 | 79964.1 | 5.3 | 8.3 | 7.1 | 10.0 | 0.0 | 0.0 |
| DEX0488_019.nt.4 | 79955 | 5.3 | 6.2 | 7.1 | 7.7 | 0.0 | 0.0 |
| DEX0488_019.nt.4 | 79955.1 | 5.3 | 6.2 | 7.1 | 7.7 | 0.0 | 0.0 |
| DEX0488_019.nt.4 | 79956 | 10.5 | 13.3 | 14.3 | 15.4 | 0.0 | 0.0 |
| DEX0488_019.nt.4 | 79956.1 | 5.3 | 9.1 | 7.1 | 10.0 | 0.0 | 0.0 |
| DEX0488_019.nt.4 | 79959 | 31.6 | 40.0 | 42.9 | 50.0 | 0.0 | 0.0 |
| DEX0488_019.nt.4 | 79959.1 | 26.3 | 35.7 | 35.7 | 41.7 | 0.0 | 0.0 |
| DEX0488_019.nt.4 | 79960 | 15.8 | 20.0 | 21.4 | 23.1 | 0.0 | 0.0 |
| DEX0488_019.nt.4 | 79960.1 | 21.1 | 28.6 | 28.6 | 33.3 | 0.0 | 0.0 |
| DEX0488_019.nt.4 | 79963 | 5.3 | 7.1 | 7.1 | 8.3 | 0.0 | 0.0 |
| DEX0488_019.nt.4 | 79963.1 | 5.3 | 12.5 | 7.1 | 14.3 | 0.0 | 0.0 |
| DEX0488_019.nt.4 | 79964 | 5.3 | 7.7 | 7.1 | 9.1 | 0.0 | 0.0 |
| DEX0488_019.nt.4 | 79964.1 | 5.3 | 8.3 | 7.1 | 10.0 | 0.0 | 0.0 |
| DEX0488_019.nt.5 | 79959 | 31.6 | 40.0 | 42.9 | 50.0 | 0.0 | 0.0 |
| DEX0488_019.nt.5 | 79959.1 | 26.3 | 35.7 | 35.7 | 41.7 | 0.0 | 0.0 |
| DEX0488_019.nt.5 | 79960 | 15.8 | 20.0 | 21.4 | 23.1 | 0.0 | 0.0 |
| DEX0488_019.nt.5 | 79960.1 | 21.1 | 28.6 | 28.6 | 33.3 | 0.0 | 0.0 |
| DEX0488_019.nt.6 | 79955 | 5.3 | 6.2 | 7.1 | 7.7 | 0.0 | 0.0 |
| DEX0488_019.nt.6 | 79955.1 | 5.3 | 6.2 | 7.1 | 7.7 | 0.0 | 0.0 |
| DEX0488_019.nt.6 | 79956 | 10.5 | 13.3 | 14.3 | 15.4 | 0.0 | 0.0 |
| DEX0488_019.nt.6 | 79956.1 | 5.3 | 9.1 | 7.1 | 10.0 | 0.0 | 0.0 |
| DEX0488_019.nt.6 | 79959 | 31.6 | 40.0 | 42.9 | 50.0 | 0.0 | 0.0 |
| DEX0488_019.nt.6 | 79959.1 | 26.3 | 35.7 | 35.7 | 41.7 | 0.0 | 0.0 |
| DEX0488_019.nt.6 | 79960 | 15.8 | 20.0 | 21.4 | 23.1 | 0.0 | 0.0 |
| DEX0488_019.nt.6 | 79960.1 | 21.1 | 28.6 | 28.6 | 33.3 | 0.0 | 0.0 |
| DEX0488_019.nt.6 | 79963 | 5.3 | 7.1 | 7.1 | 8.3 | 0.0 | 0.0 |
| DEX0488_019.nt.6 | 79963.1 | 5.3 | 12.5 | 7.1 | 14.3 | 0.0 | 0.0 |
| DEX0488_019.nt.6 | 79964 | 5.3 | 7.7 | 7.1 | 9.1 | 0.0 | 0.0 |
| DEX0488_019.nt.6 | 79964.1 | 5.3 | 8.3 | 7.1 | 10.0 | 0.0 | 0.0 |
| DEX0488_019.nt.7 | 79955 | 5.3 | 6.2 | 7.1 | 7.7 | 0.0 | 0.0 |
| DEX0488_019.nt.7 | 79955.1 | 5.3 | 6.2 | 7.1 | 7.7 | 0.0 | 0.0 |
| DEX0488_019.nt.7 | 79956 | 10.5 | 13.3 | 14.3 | 15.4 | 0.0 | 0.0 |
| DEX0488_019.nt.7 | 79956.1 | 5.3 | 9.1 | 7.1 | 10.0 | 0.0 | 0.0 |
| DEX0488_019.nt.7 | 79959 | 31.6 | 40.0 | 42.9 | 50.0 | 0.0 | 0.0 |
| DEX0488_019.nt.7 | 79959.1 | 26.3 | 35.7 | 35.7 | 41.7 | 0.0 | 0.0 |
| DEX0488_019.nt.7 | 79960 | 15.8 | 20.0 | 21.4 | 23.1 | 0.0 | 0.0 |
| DEX0488_019.nt.7 | 79960.1 | 21.1 | 28.6 | 28.6 | 33.3 | 0.0 | 0.0 |
| DEX0488_019.nt.7 | 79963 | 5.3 | 7.1 | 7.1 | 8.3 | 0.0 | 0.0 |
| DEX0488_019.nt.7 | 79963.1 | 5.3 | 12.5 | 7.1 | 14.3 | 0.0 | 0.0 |
| DEX0488_019.nt.7 | 79964 | 5.3 | 7.7 | 7.1 | 9.1 | 0.0 | 0.0 |
| DEX0488_019.nt.7 | 79964.1 | 5.3 | 8.3 | 7.1 | 10.0 | 0.0 | 0.0 |
| DEX0488_019.nt.8 | 79955 | 5.3 | 6.2 | 7.1 | 7.7 | 0.0 | 0.0 |
| DEX0488_019.nt.8 | 79955.1 | 5.3 | 6.2 | 7.1 | 7.7 | 0.0 | 0.0 |
| DEX0488_019.nt.8 | 79956 | 10.5 | 13.3 | 14.3 | 15.4 | 0.0 | 0.0 |
| DEX0488_019.nt.8 | 79956.1 | 5.3 | 9.1 | 7.1 | 10.0 | 0.0 | 0.0 |
| DEX0488_019.nt.8 | 79959 | 31.6 | 40.0 | 42.9 | 50.0 | 0.0 | 0.0 |
| DEX0488_019.nt.8 | 79959.1 | 26.3 | 35.7 | 35.7 | 41.7 | 0.0 | 0.0 |
| DEX0488_019.nt.8 | 79960 | 15.8 | 20.0 | 21.4 | 23.1 | 0.0 | 0.0 |
| DEX0488_019.nt.8 | 79960.1 | 21.1 | 28.6 | 28.6 | 33.3 | 0.0 | 0.0 |
| DEX0488_019.nt.8 | 79963 | 5.3 | 7.1 | 7.1 | 8.3 | 0.0 | 0.0 |
| DEX0488_019.nt.8 | 79963.1 | 5.3 | 12.5 | 7.1 | 14.3 | 0.0 | 0.0 |
| DEX0488_019.nt.8 | 79964 | 5.3 | 7.7 | 7.1 | 9.1 | 0.0 | 0.0 |
| DEX0488_019.nt.8 | 79964.1 | 5.3 | 8.3 | 7.1 | 10.0 | 0.0 | 0.0 |
| DEX0488_020.nt.1 | 77771 | 42.1 | 72.7 | 50.0 | 87.5 | 20.0 | 33.3 |
| DEX0488_020.nt.1 | 77771.1 | 47.4 | 81.8 | 50.0 | 87.5 | 40.0 | 66.7 |
| DEX0488_020.nt.1 | 77772 | 26.3 | 62.5 | 35.7 | 83.3 | 0.0 | 0.0 |
| DEX0488_020.nt.1 | 77772.1 | 31.6 | 75.0 | 35.7 | 83.3 | 20.0 | 50.0 |
| DEX0488_021.nt.1 | 21187 | 5.3 | 9.1 | 7.1 | 12.5 | 0.0 | 0.0 |
| DEX0488_021.nt.1 | 21187.1 | 5.3 | 11.1 | 7.1 | 14.3 | 0.0 | 0.0 |
| DEX0488_021.nt.1 | 78927 | 26.3 | 35.7 | 21.4 | 27.3 | 40.0 | 66.7 |
| DEX0488_021.nt.1 | 78927.1 | 21.1 | 30.8 | 14.3 | 20.0 | 40.0 | 66.7 |
| DEX0488_021.nt.1 | 78928 | 0.0 | 0.0 | 0.0 | 0.0 | 0.0 | 0.0 |
| DEX0488_021.nt.1 | 78928.1 | 0.0 | 0.0 | 0.0 | 0.0 | 0.0 | 0.0 |
| DEX0488_021.nt.2 | 21187 | 5.3 | 9.1 | 7.1 | 12.5 | 0.0 | 0.0 |
| DEX0488_021.nt.2 | 21187.1 | 5.3 | 11.1 | 7.1 | 14.3 | 0.0 | 0.0 |
| DEX0488_021.nt.2 | 78927 | 26.3 | 35.7 | 21.4 | 27.3 | 40.0 | 66.7 |
| DEX0488_021.nt.2 | 78927.1 | 21.1 | 30.8 | 14.3 | 20.0 | 40.0 | 66.7 |
| DEX0488_021.nt.2 | 78928 | 0.0 | 0.0 | 0.0 | 0.0 | 0.0 | 0.0 |
| DEX0488_021.nt.2 | 78928.1 | 0.0 | 0.0 | 0.0 | 0.0 | 0.0 | 0.0 |
| DEX0488_022.nt.1 | 79699 | 36.8 | 36.8 | 28.6 | 28.6 | 60.0 | 60.0 |
| DEX0488_022.nt.1 | 79699.1 | 36.8 | 36.8 | 35.7 | 35.7 | 40.0 | 40.0 |
| DEX0488_022.nt.1 | 79700 | 36.8 | 36.8 | 28.6 | 28.6 | 60.0 | 60.0 |
| DEX0488_022.nt.1 | 79700.1 | 36.8 | 36.8 | 35.7 | 35.7 | 40.0 | 40.0 |
| DEX0488_022.nt.2 | 79699 | 36.8 | 36.8 | 28.6 | 28.6 | 60.0 | 60.0 |
| DEX0488_022.nt.2 | 79699.1 | 36.8 | 36.8 | 35.7 | 35.7 | 40.0 | 40.0 |
| DEX0488_022.nt.2 | 79700 | 36.8 | 36.8 | 28.6 | 28.6 | 60.0 | 60.0 |
| DEX0488_022.nt.2 | 79700.1 | 36.8 | 36.8 | 35.7 | 35.7 | 40.0 | 40.0 |
| DEX0488_022.nt.3 | 79699 | 36.8 | 36.8 | 28.6 | 28.6 | 60.0 | 60.0 |
| DEX0488_022.nt.3 | 79699.1 | 36.8 | 36.8 | 35.7 | 35.7 | 40.0 | 40.0 |
| DEX0488_022.nt.3 | 79700 | 36.8 | 36.8 | 28.6 | 28.6 | 60.0 | 60.0 |
| DEX0488_022.nt.3 | 79700.1 | 36.8 | 36.8 | 35.7 | 35.7 | 40.0 | 40.0 |
| DEX0488_022.nt.4 | 79699 | 36.8 | 36.8 | 28.6 | 28.6 | 60.0 | 60.0 |
| DEX0488_022.nt.4 | 79699.1 | 36.8 | 36.8 | 35.7 | 35.7 | 40.0 | 40.0 |
| DEX0488_022.nt.4 | 79700 | 36.8 | 36.8 | 28.6 | 28.6 | 60.0 | 60.0 |
| DEX0488_022.nt.4 | 79700.1 | 36.8 | 36.8 | 35.7 | 35.7 | 40.0 | 40.0 |
| DEX0488_022.nt.5 | 79699 | 36.8 | 36.8 | 28.6 | 28.6 | 60.0 | 60.0 |
| DEX0488_022.nt.5 | 79699.1 | 36.8 | 36.8 | 35.7 | 35.7 | 40.0 | 40.0 |
| DEX0488_022.nt.5 | 79700 | 36.8 | 36.8 | 28.6 | 28.6 | 60.0 | 60.0 |
| DEX0488_022.nt.5 | 79700.1 | 36.8 | 36.8 | 35.7 | 35.7 | 40.0 | 40.0 |
| DEX0488_022.nt.6 | 79699 | 36.8 | 36.8 | 28.6 | 28.6 | 60.0 | 60.0 |
| DEX0488_022.nt.6 | 79699.1 | 36.8 | 36.8 | 35.7 | 35.7 | 40.0 | 40.0 |
| DEX0488_022.nt.6 | 79700 | 36.8 | 36.8 | 28.6 | 28.6 | 60.0 | 60.0 |
| DEX0488_022.nt.6 | 79700.1 | 36.8 | 36.8 | 35.7 | 35.7 | 40.0 | 40.0 |
| DEX0488_022.nt.7 | 79699 | 36.8 | 36.8 | 28.6 | 28.6 | 60.0 | 60.0 |
| DEX0488_022.nt.7 | 79699.1 | 36.8 | 36.8 | 35.7 | 35.7 | 40.0 | 40.0 |
| DEX0488_022.nt.7 | 79700 | 36.8 | 36.8 | 28.6 | 28.6 | 60.0 | 60.0 |
| DEX0488_022.nt.7 | 79700.1 | 36.8 | 36.8 | 35.7 | 35.7 | 40.0 | 40.0 |
| DEX0488_022.nt.8 | 79699 | 36.8 | 36.8 | 28.6 | 28.6 | 60.0 | 60.0 |
| DEX0488_022.nt.8 | 79699.1 | 36.8 | 36.8 | 35.7 | 35.7 | 40.0 | 40.0 |
| DEX0488_022.nt.8 | 79700 | 36.8 | 36.8 | 28.6 | 28.6 | 60.0 | 60.0 |
| DEX0488_022.nt.8 | 79700.1 | 36.8 | 36.8 | 35.7 | 35.7 | 40.0 | 40.0 |
| DEX0488_023.nt.1 | 78715 | 47.4 | 52.9 | 64.3 | 69.2 | 0.0 | 0.0 |
| DEX0488_023.nt.1 | 78715.1 | 15.8 | 37.5 | 21.4 | 42.9 | 0.0 | 0.0 |
| DEX0488_023.nt.1 | 78716 | 47.4 | 52.9 | 64.3 | 69.2 | 0.0 | 0.0 |
| DEX0488_023.nt.1 | 78716.1 | 47.4 | 52.9 | 64.3 | 69.2 | 0.0 | 0.0 |
| DEX0488_023.nt.2 | 78715 | 47.4 | 52.9 | 64.3 | 69.2 | 0.0 | 0.0 |
| DEX0488_023.nt.2 | 78715.1 | 15.8 | 37.5 | 21.4 | 42.9 | 0.0 | 0.0 |
| DEX0488_023.nt.2 | 78716 | 47.4 | 52.9 | 64.3 | 69.2 | 0.0 | 0.0 |
| DEX0488_023.nt.2 | 78716.1 | 47.4 | 52.9 | 64.3 | 69.2 | 0.0 | 0.0 |
| DEX0488_024.nt.1 | 79699 | 36.8 | 36.8 | 28.6 | 28.6 | 60.0 | 60.0 |
| DEX0488_024.nt.1 | 79699.1 | 36.8 | 36.8 | 35.7 | 35.7 | 40.0 | 40.0 |
| DEX0488_024.nt.1 | 79700 | 36.8 | 36.8 | 28.6 | 28.6 | 60.0 | 60.0 |
| DEX0488_024.nt.1 | 79700.1 | 36.8 | 36.8 | 35.7 | 35.7 | 40.0 | 40.0 |
| DEX0488_024.nt.2 | 79699 | 36.8 | 36.8 | 28.6 | 28.6 | 60.0 | 60.0 |
| DEX0488_024.nt.2 | 79699.1 | 36.8 | 36.8 | 35.7 | 35.7 | 40.0 | 40.0 |
| DEX0488_024.nt.2 | 79700 | 36.8 | 36.8 | 28.6 | 28.6 | 60.0 | 60.0 |
| DEX0488_024.nt.2 | 79700.1 | 36.8 | 36.8 | 35.7 | 35.7 | 40.0 | 40.0 |
| DEX0488_025.nt.1 | 90527 | 0.0 | 0.0 | 0.0 | 0.0 | 0.0 | 0.0 |
| DEX0488_025.nt.1 | 90527.1 | 0.0 | 0.0 | 0.0 | 0.0 | 0.0 | 0.0 |
| DEX0488_025.nt.1 | 90528 | 10.5 | 12.5 | 7.1 | 8.3 | 20.0 | 25.0 |
| DEX0488_025.nt.1 | 90528.1 | 10.5 | 11.1 | 7.1 | 7.1 | 20.0 | 25.0 |
| DEX0488_025.nt.1 | 90543 | 0.0 | 0.0 | 0.0 | 0.0 | 0.0 | 0.0 |
| DEX0488_025.nt.1 | 90543.1 | 0.0 | 0.0 | 0.0 | 0.0 | 0.0 | 0.0 |
| DEX0488_025.nt.1 | 90544 | 5.3 | 5.9 | 0.0 | 0.0 | 20.0 | 33.3 |
| DEX0488_025.nt.1 | 90544.1 | 10.5 | 11.8 | 7.1 | 7.7 | 20.0 | 25.0 |
| DEX0488_025.nt.1 | 91047 | 0.0 | 0.0 | 0.0 | 0.0 | 0.0 | 0.0 |
| DEX0488_025.nt.1 | 91047.1 | 0.0 | 0.0 | 0.0 | 0.0 | 0.0 | 0.0 |
| DEX0488_025.nt.1 | 91048 | 5.3 | 14.3 | 0.0 | 0.0 | 20.0 | 50.0 |
| DEX0488_025.nt.1 | 91048.1 | 0.0 | 0.0 | 0.0 | 0.0 | 0.0 | 0.0 |
| DEX0488_025.nt.1 | 91051 | 0.0 | 0.0 | 0.0 | 0.0 | 0.0 | 0.0 |
| DEX0488_025.nt.1 | 91051.1 | 5.3 | 16.7 | 0.0 | 0.0 | 20.0 | 50.0 |
| DEX0488_025.nt.1 | 91052 | 0.0 | 0.0 | 0.0 | 0.0 | 0.0 | 0.0 |
| DEX0488_025.nt.1 | 91052.1 | 0.0 | 0.0 | 0.0 | 0.0 | 0.0 | 0.0 |
| DEX0488_025.nt.1 | 91055 | 0.0 | 0.0 | 0.0 | 0.0 | 0.0 | 0.0 |
| DEX0488_025.nt.1 | 91055.1 | 0.0 | 0.0 | 0.0 | 0.0 | 0.0 | 0.0 |
| DEX0488_025.nt.1 | 91056 | 0.0 | 0.0 | 0.0 | 0.0 | 0.0 | 0.0 |
| DEX0488_025.nt.1 | 91056.1 | 0.0 | 0.0 | 0.0 | 0.0 | 0.0 | 0.0 |
| DEX0488_025.nt.1 | 91171 | 0.0 | 0.0 | 0.0 | 0.0 | 0.0 | 0.0 |
| DEX0488_025.nt.1 | 91171.1 | 0.0 | 0.0 | 0.0 | 0.0 | 0.0 | 0.0 |
| DEX0488_025.nt.1 | 91172 | 5.3 | 5.6 | 0.0 | 0.0 | 20.0 | 25.0 |
| DEX0488_025.nt.1 | 91172.1 | 0.0 | 0.0 | 0.0 | 0.0 | 0.0 | 0.0 |
| DEX0488_025.nt.1 | 91271 | 0.0 | 0.0 | 0.0 | 0.0 | 0.0 | 0.0 |
| DEX0488_025.nt.1 | 91271.1 | 0.0 | 0.0 | 0.0 | 0.0 | 0.0 | 0.0 |
| DEX0488_025.nt.1 | 91272 | 5.3 | 6.7 | 0.0 | 0.0 | 20.0 | 33.3 |
| DEX0488_025.nt.1 | 91272.1 | 10.5 | 12.5 | 7.1 | 8.3 | 20.0 | 25.0 |
| DEX0488_025.nt.1 | 91275 | 0.0 | 0.0 | 0.0 | 0.0 | 0.0 | 0.0 |
| DEX0488_025.nt.1 | 91275.1 | 0.0 | 0.0 | 0.0 | 0.0 | 0.0 | 0.0 |
| DEX0488_025.nt.1 | 91276 | 5.3 | 5.9 | 0.0 | 0.0 | 20.0 | 33.3 |
| DEX0488_025.nt.1 | 91276.1 | 10.5 | 12.5 | 7.1 | 7.7 | 20.0 | 33.3 |
| DEX0488_025.nt.2 | 90528 | 10.5 | 12.5 | 7.1 | 8.3 | 20.0 | 25.0 |
| DEX0488_025.nt.2 | 90528.1 | 10.5 | 11.1 | 7.1 | 7.1 | 20.0 | 25.0 |
| DEX0488_025.nt.2 | 90544 | 5.3 | 5.9 | 0.0 | 0.0 | 20.0 | 33.3 |
| DEX0488_025.nt.2 | 90544.1 | 10.5 | 11.8 | 7.1 | 7.7 | 20.0 | 25.0 |
| DEX0488_025.nt.2 | 91172 | 5.3 | 5.6 | 0.0 | 0.0 | 20.0 | 25.0 |
| DEX0488_025.nt.2 | 91172.1 | 0.0 | 0.0 | 0.0 | 0.0 | 0.0 | 0.0 |
| DEX0488_025.nt.2 | 91272 | 5.3 | 6.7 | 0.0 | 0.0 | 20.0 | 33.3 |
| DEX0488_025.nt.2 | 91272.1 | 10.5 | 12.5 | 7.1 | 8.3 | 20.0 | 25.0 |
| DEX0488_025.nt.2 | 91276 | 5.3 | 5.9 | 0.0 | 0.0 | 20.0 | 33.3 |
| DEX0488_025.nt.2 | 91276.1 | 10.5 | 12.5 | 7.1 | 7.7 | 20.0 | 33.3 |
| DEX0488_026.nt.1 | 24160 | 0.0 | 0.0 | 0.0 | 0.0 | 0.0 | 0.0 |
| DEX0488_026.nt.1 | 24160.1 | 0.0 | 0.0 | 0.0 | 0.0 | 0.0 | 0.0 |
| DEX0488_026.nt.1 | 24160.2 | 0.0 | 0.0 | 0.0 | 0.0 | 0.0 | 0.0 |
| DEX0488_026.nt.1 | 24160.3 | 5.3 | 20.0 | 7.1 | 25.0 | 0.0 | 0.0 |
| DEX0488_026.nt.1 | 26816 | 0.0 | 0.0 | 0.0 | 0.0 | 0.0 | 0.0 |
| DEX0488_026.nt.1 | 26816.1 | 0.0 | 0.0 | 0.0 | 0.0 | 0.0 | 0.0 |
| DEX0488_027.nt.1 | 17852 | 26.3 | 62.5 | 14.3 | 40.0 | 60.0 | 100.0 |
| DEX0488_027.nt.1 | 17852.1 | 26.3 | 55.6 | 14.3 | 33.3 | 60.0 | 100.0 |
| DEX0488_027.nt.1 | 17853 | 26.3 | 83.3 | 14.3 | 66.7 | 60.0 | 100.0 |
| DEX0488_027.nt.1 | 17853.1 | 15.8 | 75.0 | 7.1 | 50.0 | 40.0 | 100.0 |
| DEX0488_027.nt.1 | 18644 | 26.3 | 55.6 | 14.3 | 33.3 | 60.0 | 100.0 |
| DEX0488_027.nt.1 | 18644.1 | 31.6 | 66.7 | 21.4 | 50.0 | 60.0 | 100.0 |
| DEX0488_027.nt.1 | 18644.2 | 26.3 | 62.5 | 14.3 | 40.0 | 60.0 | 100.0 |
| DEX0488_027.nt.1 | 18644.3 | 31.6 | 60.0 | 21.4 | 42.9 | 60.0 | 100.0 |
| DEX0488_027.nt.1 | 18645 | 26.3 | 83.3 | 21.4 | 75.0 | 40.0 | 100.0 |
| DEX0488_027.nt.1 | 18645.1 | 31.6 | 85.7 | 21.4 | 75.0 | 60.0 | 100.0 |
| DEX0488_027.nt.1 | 18645.2 | 21.1 | 80.0 | 14.3 | 66.7 | 40.0 | 100.0 |
| DEX0488_027.nt.1 | 18645.3 | 26.3 | 83.3 | 14.3 | 66.7 | 60.0 | 100.0 |
| DEX0488_027.nt.1 | 41955 | 31.6 | 85.7 | 21.4 | 75.0 | 60.0 | 100.0 |
| DEX0488_027.nt.1 | 41955.1 | 26.3 | 62.5 | 14.3 | 40.0 | 60.0 | 100.0 |
| DEX0488_027.nt.1 | 41955.2 | 26.3 | 62.5 | 14.3 | 40.0 | 60.0 | 100.0 |
| DEX0488_027.nt.1 | 41955.3 | 26.3 | 83.3 | 14.3 | 66.7 | 60.0 | 100.0 |
| DEX0488_027.nt.1 | 41955.4 | 26.3 | 62.5 | 14.3 | 40.0 | 60.0 | 100.0 |
| DEX0488_027.nt.1 | 41956 | 31.6 | 66.7 | 21.4 | 50.0 | 60.0 | 100.0 |
| DEX0488_027.nt.1 | 41956.1 | 26.3 | 100.0 | 14.3 | 100.0 | 60.0 | 100.0 |
| DEX0488_027.nt.1 | 41956.2 | 26.3 | 62.5 | 14.3 | 40.0 | 60.0 | 100.0 |
| DEX0488_027.nt.1 | 41956.3 | 21.1 | 57.1 | 7.1 | 25.0 | 60.0 | 100.0 |
| DEX0488_027.nt.1 | 41956.4 | 21.1 | 57.1 | 14.3 | 40.0 | 40.0 | 100.0 |
| DEX0488_027.nt.2 | 17852 | 26.3 | 62.5 | 14.3 | 40.0 | 60.0 | 100.0 |
| DEX0488_027.nt.2 | 17852.1 | 26.3 | 55.6 | 14.3 | 33.3 | 60.0 | 100.0 |
| DEX0488_027.nt.2 | 17853 | 26.3 | 83.3 | 14.3 | 66.7 | 60.0 | 100.0 |
| DEX0488_027.nt.2 | 17853.1 | 15.8 | 75.0 | 7.1 | 50.0 | 40.0 | 100.0 |
| DEX0488_027.nt.2 | 18644 | 26.3 | 55.6 | 14.3 | 33.3 | 60.0 | 100.0 |
| DEX0488_027.nt.2 | 18644.1 | 31.6 | 66.7 | 21.4 | 50.0 | 60.0 | 100.0 |
| DEX0488_027.nt.2 | 18644.2 | 26.3 | 62.5 | 14.3 | 40.0 | 60.0 | 100.0 |
| DEX0488_027.nt.2 | 18644.3 | 31.6 | 60.0 | 21.4 | 42.9 | 60.0 | 100.0 |
| DEX0488_027.nt.2 | 18645 | 26.3 | 83.3 | 21.4 | 75.0 | 40.0 | 100.0 |
| DEX0488_027.nt.2 | 18645.1 | 31.6 | 85.7 | 21.4 | 75.0 | 60.0 | 100.0 |
| DEX0488_027.nt.2 | 18645.2 | 21.1 | 80.0 | 14.3 | 66.7 | 40.0 | 100.0 |
| DEX0488_027.nt.2 | 18645.3 | 26.3 | 83.3 | 14.3 | 66.7 | 60.0 | 100.0 |
| DEX0488_027.nt.3 | 17852 | 26.3 | 62.5 | 14.3 | 40.0 | 60.0 | 100.0 |
| DEX0488_027.nt.3 | 17852.1 | 26.3 | 55.6 | 14.3 | 33.3 | 60.0 | 100.0 |
| DEX0488_027.nt.3 | 17853 | 26.3 | 83.3 | 14.3 | 66.7 | 60.0 | 100.0 |
| DEX0488_027.nt.3 | 17853.1 | 15.8 | 75.0 | 7.1 | 50.0 | 40.0 | 100.0 |
| DEX0488_027.nt.3 | 18644 | 26.3 | 55.6 | 14.3 | 33.3 | 60.0 | 100.0 |
| DEX0488_027.nt.3 | 18644.1 | 31.6 | 66.7 | 21.4 | 50.0 | 60.0 | 100.0 |
| DEX0488_027.nt.3 | 18644.2 | 26.3 | 62.5 | 14.3 | 40.0 | 60.0 | 100.0 |
| DEX0488_027.nt.3 | 18644.3 | 31.6 | 60.0 | 21.4 | 42.9 | 60.0 | 100.0 |
| DEX0488_027.nt.3 | 18645 | 26.3 | 83.3 | 21.4 | 75.0 | 40.0 | 100.0 |
| DEX0488_027.nt.3 | 18645.1 | 31.6 | 85.7 | 21.4 | 75.0 | 60.0 | 100.0 |
| DEX0488_027.nt.3 | 18645.2 | 21.1 | 80.0 | 14.3 | 66.7 | 40.0 | 100.0 |
| DEX0488_027.nt.3 | 18645.3 | 26.3 | 83.3 | 14.3 | 66.7 | 60.0 | 100.0 |
| DEX0488_027.nt.4 | 17852 | 26.3 | 62.5 | 14.3 | 40.0 | 60.0 | 100.0 |
| DEX0488_027.nt.4 | 17852.1 | 26.3 | 55.6 | 14.3 | 33.3 | 60.0 | 100.0 |
| DEX0488_027.nt.4 | 17853 | 26.3 | 83.3 | 14.3 | 66.7 | 60.0 | 100.0 |
| DEX0488_027.nt.4 | 17853.1 | 15.8 | 75.0 | 7.1 | 50.0 | 40.0 | 100.0 |
| DEX0488_027.nt.4 | 18644 | 26.3 | 55.6 | 14.3 | 33.3 | 60.0 | 100.0 |
| DEX0488_027.nt.4 | 18644.1 | 31.6 | 66.7 | 21.4 | 50.0 | 60.0 | 100.0 |
| DEX0488_027.nt.4 | 18644.2 | 26.3 | 62.5 | 14.3 | 40.0 | 60.0 | 100.0 |
| DEX0488_027.nt.4 | 18644.3 | 31.6 | 60.0 | 21.4 | 42.9 | 60.0 | 100.0 |
| DEX0488_027.nt.4 | 18645 | 26.3 | 83.3 | 21.4 | 75.0 | 40.0 | 100.0 |
| DEX0488_027.nt.4 | 18645.1 | 31.6 | 85.7 | 21.4 | 75.0 | 60.0 | 100.0 |
| DEX0488_027.nt.4 | 18645.2 | 21.1 | 80.0 | 14.3 | 66.7 | 40.0 | 100.0 |
| DEX0488_027.nt.4 | 18645.3 | 26.3 | 83.3 | 14.3 | 66.7 | 60.0 | 100.0 |
| DEX0488_028.nt.1 | 33088 | 52.6 | 83.3 | 42.9 | 75.0 | 80.0 | 100.0 |
| DEX0488_028.nt.1 | 33088.1 | 47.4 | 90.0 | 35.7 | 83.3 | 80.0 | 100.0 |
| DEX0488_028.nt.1 | 33088.2 | 52.6 | 100.0 | 35.7 | 100.0 | 100.0 | 100.0 |
| DEX0488_028.nt.1 | 33088.3 | 47.4 | 81.8 | 35.7 | 71.4 | 80.0 | 100.0 |
| DEX0488_029.nt.1 | 79635 | 68.4 | 68.4 | 64.3 | 64.3 | 80.0 | 80.0 |
| DEX0488_029.nt.1 | 79635.1 | 57.9 | 57.9 | 50.0 | 50.0 | 80.0 | 80.0 |
| DEX0488_030.nt.1 | 35317 | 31.6 | 60.0 | 14.3 | 33.3 | 80.0 | 100.0 |
| DEX0488_030.nt.1 | 35317.1 | 31.6 | 54.5 | 14.3 | 28.6 | 80.0 | 100.0 |
| DEX0488_031.nt.1 | 78587 | 26.3 | 26.3 | 35.7 | 35.7 | 0.0 | 0.0 |
| DEX0488_031.nt.1 | 78587.1 | 21.1 | 21.1 | 28.6 | 28.6 | 0.0 | 0.0 |
| DEX0488_031.nt.1 | 78588 | 31.6 | 31.6 | 35.7 | 35.7 | 20.0 | 20.0 |
| DEX0488_031.nt.1 | 78588.1 | 36.8 | 36.8 | 35.7 | 35.7 | 40.0 | 40.0 |
| DEX0488_032.nt.1 | 78711 | 5.3 | 5.3 | 7.1 | 7.1 | 0.0 | 0.0 |
| DEX0488_032.nt.1 | 78711.1 | 5.3 | 5.3 | 7.1 | 7.1 | 0.0 | 0.0 |
| DEX0488_032.nt.1 | 78712 | 10.5 | 10.5 | 14.3 | 14.3 | 0.0 | 0.0 |
| DEX0488_032.nt.1 | 78712.1 | 10.5 | 10.5 | 14.3 | 14.3 | 0.0 | 0.0 |
| DEX0488_033.nt.1 | 79019 | 0.0 | 0.0 | 0.0 | 0.0 | 0.0 | 0.0 |
| DEX0488_033.nt.1 | 79019.1 | 0.0 | 0.0 | 0.0 | 0.0 | 0.0 | 0.0 |
| DEX0488_033.nt.1 | 79020 | 0.0 | 0.0 | 0.0 | 0.0 | 0.0 | 0.0 |
| DEX0488_033.nt.1 | 79020.1 | 0.0 | 0.0 | 0.0 | 0.0 | 0.0 | 0.0 |
| DEX0488_033.nt.2 | 79019 | 0.0 | 0.0 | 0.0 | 0.0 | 0.0 | 0.0 |
| DEX0488_033.nt.2 | 79019.1 | 0.0 | 0.0 | 0.0 | 0.0 | 0.0 | 0.0 |
| DEX0488_033.nt.2 | 79020 | 0.0 | 0.0 | 0.0 | 0.0 | 0.0 | 0.0 |
| DEX0488_033.nt.2 | 79020.1 | 0.0 | 0.0 | 0.0 | 0.0 | 0.0 | 0.0 |
| DEX0488_034.nt.1 | 90123 | 5.3 | 33.3 | 7.1 | 50.0 | 0.0 | 0.0 |
| DEX0488_034.nt.1 | 90123.1 | 5.3 | 33.3 | 7.1 | 50.0 | 0.0 | 0.0 |
| DEX0488_034.nt.1 | 90124 | 5.3 | 20.0 | 7.1 | 25.0 | 0.0 | 0.0 |
| DEX0488_034.nt.1 | 90124.1 | 5.3 | 25.0 | 7.1 | 33.3 | 0.0 | 0.0 |
| DEX0488_035.nt.1 | 79903 | 10.5 | 16.7 | 7.1 | 10.0 | 20.0 | 50.0 |
| DEX0488_035.nt.1 | 79903.1 | 15.8 | 23.1 | 14.3 | 18.2 | 20.0 | 50.0 |
| DEX0488_035.nt.1 | 79904 | 5.3 | 12.5 | 0.0 | 0.0 | 20.0 | 50.0 |
| DEX0488_035.nt.1 | 79904.1 | 0.0 | 0.0 | 0.0 | 0.0 | 0.0 | 0.0 |
| DEX0488_035.nt.2 | 79903 | 10.5 | 16.7 | 7.1 | 10.0 | 20.0 | 50.0 |
| DEX0488_035.nt.2 | 79903.1 | 15.8 | 23.1 | 14.3 | 18.2 | 20.0 | 50.0 |
| DEX0488_035.nt.2 | 79904 | 5.3 | 12.5 | 0.0 | 0.0 | 20.0 | 50.0 |
| DEX0488_035.nt.2 | 79904.1 | 0.0 | 0.0 | 0.0 | 0.0 | 0.0 | 0.0 |
| DEX0488_036.nt.1 | 3976 | 10.5 | 22.2 | 7.1 | 16.7 | 20.0 | 33.3 |
| DEX0488_036.nt.1 | 3976.1 | 10.5 | 14.3 | 0.0 | 0.0 | 40.0 | 66.7 |
| DEX0488_036.nt.1 | 3977 | 10.5 | 22.2 | 7.1 | 14.3 | 20.0 | 50.0 |
| DEX0488_036.nt.1 | 3977.1 | 0.0 | 0.0 | 0.0 | 0.0 | 0.0 | 0.0 |
| DEX0488_036.nt.2 | 3976 | 10.5 | 22.2 | 7.1 | 16.7 | 20.0 | 33.3 |
| DEX0488_036.nt.2 | 3976.1 | 10.5 | 14.3 | 0.0 | 0.0 | 40.0 | 66.7 |
| DEX0488_036.nt.2 | 3977 | 10.5 | 22.2 | 7.1 | 14.3 | 20.0 | 50.0 |
| DEX0488_036.nt.2 | 3977.1 | 0.0 | 0.0 | 0.0 | 0.0 | 0.0 | 0.0 |

[0492] Colon Cancer Chips

[0493] For colon cancer, the Colon Array Chip and the Multi-Cancer Array Chip designs were evaluated with overlapping sets of a total of 38 samples, comparing the expression patterns of colon cancer derived polyA+ RNA to polyA+ RNA isolated from a pool of 7 normal colon tissues. For the Colon Array Chip all 38 samples (23 Ascending colon carcinomas and 15 Rectosigmoidal carcinomas including: 5 stage I cancers, 15 stage II cancers, 15 stage III and 2 stage IV cancers, as well as 28 Grade 1/2 and 10 Grade 3 cancers) were analyzed. The histopathologic grades for cancer are classified as follows: GX, cannot be assessed; G1, well differentiated; G2, Moderately differentiated; G3, poorly differentiated; and G4, undifferentiated. AJCC Cancer Staging Handbook, 5^{th} Edition, 1998, page 9. For the Colon Array Chip analysis, samples were further divided into groups based on the expression pattern of the known colon cancer associated gene Thymidilate Synthase (TS) (13 TS up 25 TS not up). The association of TS with advanced colorectal cancer is well documented. Paradiso et al., Br J Cancer 82(3):560-7 (2000); Etienne et al., J Clin Oncol. 20(12):2832-43 (2002); Aschele et al. Clin Cancer Res. 6(12):4797-802 (2000). For the Multi-Cancer Array Chip a subset of 27 of these samples (14 Ascending colon carcinomas and 13 Rectosigmoidal carcinomas including: 3 stage I cancers, 9 stage II cancers, 13 stage III and 2 stage IV cancers) were assessed. In addition to the tissue samples, five colon cancer cell lines (HT29, SW480, SW620, HCT-16, CaCo2) were analyzed on the Colon Array Chip.

[0494] The results for the statistically significant up-regulated nucleic acid sequences on the Colon Array Chip are shown in Table(s) 5-8. The results for the statistically significant up-regulated nucleic acid sequences on the Multi-Cancer Array Chip are shown in Table(s) 9-10.

[0495] The first two columns of each table contain information about the sequence itself (DEX ID, Oligo Name), the next columns show the results obtained for all (“ALL”) the colon samples, ascending colon carcinomas (“ASC”), Rectosigmoidal carcinomas (“RS”), cancers corresponding to stages I and II (“ST1,2”), stages III and IV (“ST3,4”), grades 1 and 2 (“GRI,2”), grade 3 (“GR3”), cancers exhibiting up-regulation of the TS gene (“TSup”) or those not exhibiting up-regulation of the TS gene (“NOT TSup”). ‘% up’ indicates the percentage of all experiments in which up-regulation of at least 2-fold was observed n=38 for the Colon Array Chip (n=27 for the Multi-Cancer Array Chip), ‘% valid up’ indicates the percentage of experiments with valid expression values in which up-regulation of at least 2-fold was observed. For the cell lines ‘% up’ indicates the percentage of all experiments in which up-regulation of at least 1.8-fold was observed (n=5 for the Colon Array Chip), ‘% valid up’ indicates the percentage of experiments with valid expression values in which up-regulation of at least 1.8-fold was observed.

TABLE 5

| | | | Cln | | Cln | | Cln | | Cln | | Cln |
|---|---|---|---|---|---|---|---|---|---|---|---|
| | | Cln | ALL % | Cln | ASC % | Cln | RS % | Cln | ST1, 2 | Cln | ST3, 4 |
| | | ALL | valid | ASC | valid | RS | valid | ST1, 2 | % valid | ST3, 4 | % valid |
| | Oligo | % up | up | % up | up | % up | up | % up | up | % up | up |
| DEX ID | Name | n = 38 | n = 38 | n = 23 | n = 23 | n = 15 | n = 15 | n = 20 | n = 20 | n = 18 | n = 18 |
| DEX0488_{—} | 31028 | 50.0 | 61.3 | 65.2 | 83.3 | 26.7 | 30.8 | 50.0 | 62.5 | 50.0 | 60.0 |
| 006.nt.1 | | | | | | | | | | | |
| DEX0488_{—} | 31029 | 55.3 | 63.6 | 65.2 | 78.9 | 40.0 | 42.9 | 45.0 | 56.2 | 66.7 | 70.6 |
| 006.nt.1 | | | | | | | | | | | |
| DEX0488_{—} | 31059 | 50.0 | 61.3 | 60.9 | 77.8 | 33.3 | 38.5 | 45.0 | 56.2 | 55.6 | 66.7 |
| 006.nt.1 | | | | | | | | | | | |
| DEX0488_{—} | 33840 | 73.7 | 73.7 | 82.6 | 82.6 | 60.0 | 60.0 | 75.0 | 75.0 | 72.2 | 72.2 |
| 011.nt.1 | | | | | | | | | | | |
| DEX0488_{—} | 33841 | 73.7 | 73.7 | 87.0 | 87.0 | 53.3 | 53.3 | 75.0 | 75.0 | 72.2 | 72.2 |
| 011.nt.1 | | | | | | | | | | | |
| DEX0488_{—} | 39927 | 76.3 | 76.3 | 82.6 | 82.6 | 66.7 | 66.7 | 75.0 | 75.0 | 77.8 | 77.8 |
| 011.nt.1 | | | | | | | | | | | |
| DEX0488_{—} | 39927.1 | 71.1 | 71.1 | 78.3 | 78.3 | 60.0 | 60.0 | 75.0 | 75.0 | 66.7 | 66.7 |
| 011.nt.1 | | | | | | | | | | | |
| DEX0488_{—} | 39928 | 71.1 | 71.1 | 82.6 | 82.6 | 53.3 | 53.3 | 70.0 | 70.0 | 72.2 | 72.2 |
| 011.nt.1 | | | | | | | | | | | |
| DEX0488_{—} | 39928.1 | 68.4 | 72.2 | 87.0 | 87.0 | 40.0 | 46.2 | 75.0 | 75.0 | 61.1 | 68.8 |
| 011.nt.1 | | | | | | | | | | | |
| DEX0488_{—} | 21187 | 0.0 | 0.0 | 0.0 | 0.0 | 0.0 | 0.0 | 0.0 | 0.0 | 0.0 | 0.0 |
| 012.nt.1 | | | | | | | | | | | |
| DEX0488_{—} | 21187.1 | 2.6 | 2.6 | 4.3 | 4.3 | 0.0 | 0.0 | 0.0 | 0.0 | 5.6 | 5.6 |
| 012.nt.1 | | | | | | | | | | | |
| DEX0488_{—} | 21188 | 0.0 | 0.0 | 0.0 | 0.0 | 0.0 | 0.0 | 0.0 | 0.0 | 0.0 | 0.0 |
| 012.nt.1 | | | | | | | | | | | |
| DEX0488_{—} | 21188.1 | 0.0 | 0.0 | 0.0 | 0.0 | 0.0 | 0.0 | 0.0 | 0.0 | 0.0 | 0.0 |
| 012.nt.1 | | | | | | | | | | | |
| DEX0488_{—} | 33870 | 10.5 | 10.5 | 13.0 | 13.0 | 6.7 | 6.7 | 10.0 | 10.0 | 11.1 | 11.1 |
| 015.nt.1 | | | | | | | | | | | |
| DEX0488_{—} | 33870 | 10.5 | 10.5 | 13.0 | 13.0 | 6.7 | 6.7 | 10.0 | 10.0 | 11.1 | 11.1 |
| 015.nt.2 | | | | | | | | | | | |
| DEX0488_{—} | 33871 | 10.5 | 10.5 | 13.0 | 13.0 | 6.7 | 6.7 | 10.0 | 10.0 | 11.1 | 11.1 |
| 015.nt.2 | | | | | | | | | | | |
| DEX0488_{—} | 31028 | 50.0 | 61.3 | 65.2 | 83.3 | 26.7 | 30.8 | 50.0 | 62.5 | 50.0 | 60.0 |
| 017.nt.1 | | | | | | | | | | | |
| DEX0488_{—} | 31029 | 55.3 | 63.6 | 65.2 | 78.9 | 40.0 | 42.9 | 45.0 | 56.2 | 66.7 | 70.6 |
| 017.nt.1 | | | | | | | | | | | |
| DEX0488_{—} | 31059 | 50.0 | 61.3 | 60.9 | 77.8 | 33.3 | 38.5 | 45.0 | 56.2 | 55.6 | 66.7 |
| 017.nt.1 | | | | | | | | | | | |
| DEX0488_{—} | 21187 | 0.0 | 0.0 | 0.0 | 0.0 | 0.0 | 0.0 | 0.0 | 0.0 | 0.0 | 0.0 |
| 021.nt.1 | | | | | | | | | | | |
| DEX0488_{—} | 21187.1 | 2.6 | 2.6 | 4.3 | 4.3 | 0.0 | 0.0 | 0.0 | 0.0 | 5.6 | 5.6 |
| 021.nt.1 | | | | | | | | | | | |
| DEX0488_{—} | 21187 | 0.0 | 0.0 | 0.0 | 0.0 | 0.0 | 0.0 | 0.0 | 0.0 | 0.0 | 0.0 |
| 021.nt.2 | | | | | | | | | | | |
| DEX0488_{—} | 21187.1 | 2.6 | 2.6 | 4.3 | 4.3 | 0.0 | 0.0 | 0.0 | 0.0 | 5.6 | 5.6 |
| 021.nt.2 | | | | | | | | | | | |
| DEX0488_{—} | 14344 | 0.0 | 0.0 | 0.0 | 0.0 | 0.0 | 0.0 | 0.0 | 0.0 | 0.0 | 0.0 |
| 024.nt.1 | | | | | | | | | | | |
| DEX0488_{—} | 14345 | 0.0 | 0.0 | 0.0 | 0.0 | 0.0 | 0.0 | 0.0 | 0.0 | 0.0 | 0.0 |
| 024.nt.1 | | | | | | | | | | | |
| DEX0488_{—} | 14344 | 0.0 | 0.0 | 0.0 | 0.0 | 0.0 | 0.0 | 0.0 | 0.0 | 0.0 | 0.0 |
| 024.nt.2 | | | | | | | | | | | |
| DEX0488_{—} | 14345 | 0.0 | 0.0 | 0.0 | 0.0 | 0.0 | 0.0 | 0.0 | 0.0 | 0.0 | 0.0 |
| 024.nt.2 | | | | | | | | | | | |
| DEX0488_{—} | 24160 | 0.0 | 0.0 | 0.0 | 0.0 | 0.0 | 0.0 | 0.0 | 0.0 | 0.0 | 0.0 |
| 026.nt.1 | | | | | | | | | | | |
| DEX0488_{—} | 24160.1 | 0.0 | 0.0 | 0.0 | 0.0 | 0.0 | 0.0 | 0.0 | 0.0 | 0.0 | 0.0 |
| 026.nt.1 | | | | | | | | | | | |
| DEX0488_{—} | 17852 | 76.3 | 76.3 | 78.3 | 78.3 | 73.3 | 73.3 | 80.0 | 80.0 | 72.2 | 72.2 |
| 027.nt.1 | | | | | | | | | | | |
| DEX0488_{—} | 17853 | 76.3 | 76.3 | 78.3 | 78.3 | 73.3 | 73.3 | 80.0 | 80.0 | 72.2 | 72.2 |
| 027.nt.1 | | | | | | | | | | | |
| DEX0488_{—} | 18644 | 73.7 | 73.7 | 78.3 | 78.3 | 66.7 | 66.7 | 75.0 | 75.0 | 72.2 | 72.2 |
| 027.nt.1 | | | | | | | | | | | |
| DEX0488_{—} | 18644.1 | 73.7 | 73.7 | 78.3 | 78.3 | 66.7 | 66.7 | 75.0 | 75.0 | 72.2 | 72.2 |
| 027.nt.1 | | | | | | | | | | | |
| DEX0488_{—} | 18645 | 76.3 | 76.3 | 78.3 | 78.3 | 73.3 | 73.3 | 80.0 | 80.0 | 72.2 | 72.2 |
| 027.nt.1 | | | | | | | | | | | |
| DEX0488_{—} | 18645.1 | 76.3 | 76.3 | 78.3 | 78.3 | 73.3 | 73.3 | 80.0 | 80.0 | 72.2 | 72.2 |
| 027.nt.1 | | | | | | | | | | | |
| DEX0488_{—} | 17852 | 76.3 | 76.3 | 78.3 | 78.3 | 73.3 | 73.3 | 80.0 | 80.0 | 72.2 | 72.2 |
| 027.nt.2 | | | | | | | | | | | |
| DEX0488_{—} | 17853 | 76.3 | 76.3 | 78.3 | 78.3 | 73.3 | 73.3 | 80.0 | 80.0 | 72.2 | 72.2 |
| 027.nt.2 | | | | | | | | | | | |
| DEX0488_{—} | 18644 | 73.7 | 73.7 | 78.3 | 78.3 | 66.7 | 66.7 | 75.0 | 75.0 | 72.2 | 72.2 |
| 027.nt.2 | | | | | | | | | | | |
| DEX0488_{—} | 18644.1 | 73.7 | 73.7 | 78.3 | 78.3 | 66.7 | 66.7 | 75.0 | 75.0 | 72.2 | 72.2 |
| 027.nt.2 | | | | | | | | | | | |
| DEX0488_{—} | 18645 | 76.3 | 76.3 | 78.3 | 78.3 | 73.3 | 73.3 | 80.0 | 80.0 | 72.2 | 72.2 |
| 027.nt.2 | | | | | | | | | | | |
| DEX0488_{—} | 18645.1 | 76.3 | 76.3 | 78.3 | 78.3 | 73.3 | 73.3 | 80.0 | 80.0 | 72.2 | 72.2 |
| 027.nt.2 | | | | | | | | | | | |
| DEX0488_{—} | 17852 | 76.3 | 76.3 | 78.3 | 78.3 | 73.3 | 73.3 | 80.0 | 80.0 | 72.2 | 72.2 |
| 027.nt.3 | | | | | | | | | | | |
| DEX0488_{—} | 17853 | 76.3 | 76.3 | 78.3 | 78.3 | 73.3 | 73.3 | 80.0 | 80.0 | 72.2 | 72.2 |
| 027.nt.3 | | | | | | | | | | | |
| DEX0488_{—} | 18644 | 73.7 | 73.7 | 78.3 | 78.3 | 66.7 | 66.7 | 75.0 | 75.0 | 72.2 | 72.2 |
| 027.nt.3 | | | | | | | | | | | |
| DEX0488_{—} | 18644.1 | 73.7 | 73.7 | 78.3 | 78.3 | 66.7 | 66.7 | 75.0 | 75.0 | 72.2 | 72.2 |
| 027.nt.3 | | | | | | | | | | | |
| DEX0488_{—} | 18645 | 76.3 | 76.3 | 78.3 | 78.3 | 73.3 | 73.3 | 80.0 | 80.0 | 72.2 | 72.2 |
| 027.nt.3 | | | | | | | | | | | |
| DEX0488_{—} | 18645.1 | 76.3 | 76.3 | 78.3 | 78.3 | 73.3 | 73.3 | 80.0 | 80.0 | 72.2 | 72.2 |
| 027.nt.3 | | | | | | | | | | | |
| DEX0488_{—} | 17852 | 76.3 | 76.3 | 78.3 | 78.3 | 73.3 | 73.3 | 80.0 | 80.0 | 72.2 | 72.2 |
| 027.nt.4 | | | | | | | | | | | |
| DEX0488_{—} | 17853 | 76.3 | 76.3 | 78.3 | 78.3 | 73.3 | 73.3 | 80.0 | 80.0 | 72.2 | 72.2 |
| 027.nt.4 | | | | | | | | | | | |
| DEX0488_{—} | 18644 | 73.7 | 73.7 | 78.3 | 78.3 | 66.7 | 66.7 | 75.0 | 75.0 | 72.2 | 72.2 |
| 027.nt.4 | | | | | | | | | | | |
| DEX0488_{—} | 18644.1 | 73.7 | 73.7 | 78.3 | 78.3 | 66.7 | 66.7 | 75.0 | 75.0 | 72.2 | 72.2 |
| 027.nt.4 | | | | | | | | | | | |
| DEX0488_{—} | 18645 | 76.3 | 76.3 | 78.3 | 78.3 | 73.3 | 73.3 | 80.0 | 80.0 | 72.2 | 72.2 |
| 027.nt.4 | | | | | | | | | | | |
| DEX0488_{—} | 18645.1 | 76.3 | 76.3 | 78.3 | 78.3 | 73.3 | 73.3 | 80.0 | 80.0 | 72.2 | 72.2 |
| 027.nt.4 | | | | | | | | | | | |
| DEX0488_{—} | 33088 | 0.0 | 0.0 | 0.0 | 0.0 | 0.0 | 0.0 | 0.0 | 0.0 | 0.0 | 0.0 |
| 028.nt.1 | | | | | | | | | | | |
| DEX0488_{—} | 33088.1 | 0.0 | 0.0 | 0.0 | 0.0 | 0.0 | 0.0 | 0.0 | 0.0 | 0.0 | 0.0 |
| 028.nt.1 | | | | | | | | | | | |
| DEX0488_{—} | 35317 | 0.0 | 0.0 | 0.0 | 0.0 | 0.0 | 0.0 | 0.0 | 0.0 | 0.0 | 0.0 |
| 030.nt.1 | | | | | | | | | | | |

[0496] TABLE 6

| | | | Cln | | Cln | | | | Cln | | Cln |
|---|---|---|---|---|---|---|---|---|---|---|---|
| | | Cln | 550 | Cln | 550 | Cln | Cln | Cln | 550 | Cln | 550 |
| | | 550 | ALL | 550 | ASC | 550 | 550 RS | 550 | ST1, 2 | 550 | ST3, 4 |
| | | ALL | % valid | ASC | % valid | RS | % valid | ST1, 2 | % valid | ST3, 4 | % valid |
| | Oligo | % up | up | % up | up | % up | up | % up | up | % up | up |
| DEX ID | Name | n = 38 | n = 38 | n = 23 | n = 23 | n = 15 | n = 15 | n = 20 | n = 20 | n = 18 | n = 18 |
| DEX0488_006.nt.1 | 31028 | 57.9 | 64.7 | 69.6 | 84.2 | 40.0 | 40.0 | 55.0 | 64.7 | 61.1 | 64.7 |
| DEX0488_006.nt.1 | 31029 | 63.2 | 66.7 | 73.9 | 81.0 | 46.7 | 46.7 | 55.0 | 61.1 | 72.2 | 72.2 |
| DEX0488_006.nt.1 | 31059 | 57.9 | 64.7 | 65.2 | 78.9 | 46.7 | 46.7 | 50.0 | 58.8 | 66.7 | 70.6 |
| DEX0488_011.nt.1 | 33840 | 73.7 | 73.7 | 82.6 | 82.6 | 60.0 | 60.0 | 75.0 | 75.0 | 72.2 | 72.2 |
| DEX0488_011.nt.1 | 33841 | 68.4 | 70.3 | 78.3 | 81.8 | 53.3 | 53.3 | 65.0 | 68.4 | 72.2 | 72.2 |
| DEX0488_011.nt.1 | 39927 | 71.1 | 71.1 | 78.3 | 78.3 | 60.0 | 60.0 | 75.0 | 75.0 | 66.7 | 66.7 |
| DEX0488_011.nt.1 | 39927.1 | 68.4 | 70.3 | 73.9 | 77.3 | 60.0 | 60.0 | 70.0 | 70.0 | 66.7 | 70.6 |
| DEX0488_011.nt.1 | 39928 | 71.1 | 71.1 | 82.6 | 82.6 | 53.3 | 53.3 | 70.0 | 70.0 | 72.2 | 72.2 |
| DEX0488_011.nt.1 | 39928.1 | 63.2 | 68.6 | 78.3 | 81.8 | 40.0 | 46.2 | 65.0 | 68.4 | 61.1 | 68.8 |
| DEX0488_012.nt.1 | 21187 | 0.0 | 0.0 | 0.0 | 0.0 | 0.0 | 0.0 | 0.0 | 0.0 | 0.0 | 0.0 |
| DEX0488_012.nt.1 | 21187.1 | 2.6 | 2.6 | 4.3 | 4.3 | 0.0 | 0.0 | 0.0 | 0.0 | 5.6 | 5.6 |
| DEX0488_012.nt.1 | 21188 | 0.0 | 0.0 | 0.0 | 0.0 | 0.0 | 0.0 | 0.0 | 0.0 | 0.0 | 0.0 |
| DEX0488_012.nt.1 | 21188.1 | 2.6 | 2.6 | 4.3 | 4.3 | 0.0 | 0.0 | 0.0 | 0.0 | 5.6 | 5.6 |
| DEX0488_015.nt.1 | 33870 | 5.3 | 5.3 | 4.3 | 4.3 | 6.7 | 6.7 | 5.0 | 5.0 | 5.6 | 5.6 |
| DEX0488_015.nt.2 | 33870 | 5.3 | 5.3 | 4.3 | 4.3 | 6.7 | 6.7 | 5.0 | 5.0 | 5.6 | 5.6 |
| DEX0488_015.nt.2 | 33871 | 7.9 | 8.3 | 8.7 | 9.1 | 6.7 | 7.1 | 10.0 | 10.5 | 5.6 | 5.9 |
| DEX0488_017.nt.1 | 31028 | 57.9 | 64.7 | 69.6 | 84.2 | 40.0 | 40.0 | 55.0 | 64.7 | 61.1 | 64.7 |
| DEX0488_017.nt.1 | 31029 | 63.2 | 66.7 | 73.9 | 81.0 | 46.7 | 46.7 | 55.0 | 61.1 | 72.2 | 72.2 |
| DEX0488_017.nt.1 | 31059 | 57.9 | 64.7 | 65.2 | 78.9 | 46.7 | 46.7 | 50.0 | 58.8 | 66.7 | 70.6 |
| DEX0488_021.nt.1 | 21187 | 0.0 | 0.0 | 0.0 | 0.0 | 0.0 | 0.0 | 0.0 | 0.0 | 0.0 | 0.0 |
| DEX0488_021.nt.1 | 21187.1 | 2.6 | 2.6 | 4.3 | 4.3 | 0.0 | 0.0 | 0.0 | 0.0 | 5.6 | 5.6 |
| DEX0488_021.nt.2 | 21187 | 0.0 | 0.0 | 0.0 | 0.0 | 0.0 | 0.0 | 0.0 | 0.0 | 0.0 | 0.0 |
| DEX0488_021.nt.2 | 21187.1 | 2.6 | 2.6 | 4.3 | 4.3 | 0.0 | 0.0 | 0.0 | 0.0 | 5.6 | 5.6 |
| DEX0488_024.nt.1 | 14344 | 0.0 | 0.0 | 0.0 | 0.0 | 0.0 | 0.0 | 0.0 | 0.0 | 0.0 | 0.0 |
| DEX0488_024.nt.1 | 14345 | 0.0 | 0.0 | 0.0 | 0.0 | 0.0 | 0.0 | 0.0 | 0.0 | 0.0 | 0.0 |
| DEX0488_024.nt.2 | 14344 | 0.0 | 0.0 | 0.0 | 0.0 | 0.0 | 0.0 | 0.0 | 0.0 | 0.0 | 0.0 |
| DEX0488_024.nt.2 | 14345 | 0.0 | 0.0 | 0.0 | 0.0 | 0.0 | 0.0 | 0.0 | 0.0 | 0.0 | 0.0 |
| DEX0488_026.nt.1 | 24160 | 0.0 | 0.0 | 0.0 | 0.0 | 0.0 | 0.0 | 0.0 | 0.0 | 0.0 | 0.0 |
| DEX0488_026.nt.1 | 24160.1 | 0.0 | 0.0 | 0.0 | 0.0 | 0.0 | 0.0 | 0.0 | 0.0 | 0.0 | 0.0 |
| DEX0488_027.nt.1 | 17852 | 71.1 | 71.1 | 78.3 | 78.3 | 60.0 | 60.0 | 75.0 | 75.0 | 66.7 | 66.7 |
| DEX0488_027.nt.1 | 17853 | 73.7 | 73.7 | 78.3 | 78.3 | 66.7 | 66.7 | 80.0 | 80.0 | 66.7 | 66.7 |
| DEX0488_027.nt.1 | 18644 | 71.1 | 71.1 | 78.3 | 78.3 | 60.0 | 60.0 | 75.0 | 75.0 | 66.7 | 66.7 |
| DEX0488_027.nt.1 | 18644.1 | 71.1 | 71.1 | 78.3 | 78.3 | 60.0 | 60.0 | 75.0 | 75.0 | 66.7 | 66.7 |
| DEX0488_027.nt.1 | 18645 | 73.7 | 73.7 | 78.3 | 78.3 | 66.7 | 66.7 | 80.0 | 80.0 | 66.7 | 66.7 |
| DEX0488_027.nt.1 | 18645.1 | 76.3 | 76.3 | 78.3 | 78.3 | 73.3 | 73.3 | 80.0 | 80.0 | 72.2 | 72.2 |
| DEX0488_027.nt.2 | 17852 | 71.1 | 71.1 | 78.3 | 78.3 | 60.0 | 60.0 | 75.0 | 75.0 | 66.7 | 66.7 |
| DEX0488_027.nt.2 | 17853 | 73.7 | 73.7 | 78.3 | 78.3 | 66.7 | 66.7 | 80.0 | 80.0 | 66.7 | 66.7 |
| DEX0488_027.nt.2 | 18644 | 71.1 | 71.1 | 78.3 | 78.3 | 60.0 | 60.0 | 75.0 | 75.0 | 66.7 | 66.7 |
| DEX0488_027.nt.2 | 18644.1 | 71.1 | 71.1 | 78.3 | 78.3 | 60.0 | 60.0 | 75.0 | 75.0 | 66.7 | 66.7 |
| DEX0488_027.nt.2 | 18645 | 73.7 | 73.7 | 78.3 | 78.3 | 66.7 | 66.7 | 80.0 | 80.0 | 66.7 | 66.7 |
| DEX0488_027.nt.2 | 18645.1 | 76.3 | 76.3 | 78.3 | 78.3 | 73.3 | 73.3 | 80.0 | 80.0 | 72.2 | 72.2 |
| DEX0488_027.nt.3 | 17852 | 71.1 | 71.1 | 78.3 | 78.3 | 60.0 | 60.0 | 75.0 | 75.0 | 66.7 | 66.7 |
| DEX0488_027.nt.3 | 17853 | 73.7 | 73.7 | 78.3 | 78.3 | 66.7 | 66.7 | 80.0 | 80.0 | 66.7 | 66.7 |
| DEX0488_027.nt.3 | 18644 | 71.1 | 71.1 | 78.3 | 78.3 | 60.0 | 60.0 | 75.0 | 75.0 | 66.7 | 66.7 |
| DEX0488_027.nt.3 | 18644.1 | 71.1 | 71.1 | 78.3 | 78.3 | 60.0 | 60.0 | 75.0 | 75.0 | 66.7 | 66.7 |
| DEX0488_027.nt.3 | 18645 | 73.7 | 73.7 | 78.3 | 78.3 | 66.7 | 66.7 | 80.0 | 80.0 | 66.7 | 66.7 |
| DEX0488_027.nt.3 | 18645.1 | 76.3 | 76.3 | 78.3 | 78.3 | 73.3 | 73.3 | 80.0 | 80.0 | 72.2 | 72.2 |
| DEX0488_027.nt.4 | 17852 | 71.1 | 71.1 | 78.3 | 78.3 | 60.0 | 60.0 | 75.0 | 75.0 | 66.7 | 66.7 |
| DEX0488_027.nt.4 | 17853 | 73.7 | 73.7 | 78.3 | 78.3 | 66.7 | 66.7 | 80.0 | 80.0 | 66.7 | 66.7 |
| DEX0488_027.nt.4 | 18644 | 71.1 | 71.1 | 78.3 | 78.3 | 60.0 | 60.0 | 75.0 | 75.0 | 66.7 | 66.7 |
| DEX0488_027.nt.4 | 18644.1 | 71.1 | 71.1 | 78.3 | 78.3 | 60.0 | 60.0 | 75.0 | 75.0 | 66.7 | 66.7 |
| DEX0488_027.nt.4 | 18645 | 73.7 | 73.7 | 78.3 | 78.3 | 66.7 | 66.7 | 80.0 | 80.0 | 66.7 | 66.7 |
| DEX0488_027.nt.4 | 18645.1 | 76.3 | 76.3 | 78.3 | 78.3 | 73.3 | 73.3 | 80.0 | 80.0 | 72.2 | 72.2 |
| DEX0488_028.nt.1 | 33088 | 10.5 | 10.5 | 13.0 | 13.0 | 6.7 | 6.7 | 15.0 | 15.0 | 5.6 | 5.6 |
| DEX0488_028.nt.1 | 33088.1 | 7.9 | 7.9 | 8.7 | 8.7 | 6.7 | 6.7 | 15.0 | 15.0 | 0.0 | 0.0 |
| DEX0488_030.nt.1 | 35317 | 0.0 | 0.0 | 0.0 | 0.0 | 0.0 | 0.0 | 0.0 | 0.0 | 0.0 | 0.0 |

[0497] TABLE 7

| | | | | | | | | Cln | |
|---|---|---|---|---|---|---|---|---|---|
| | | | Cln | | Cln | Cln | Cln TS | NOT | |
| | | Cln | GR1, 2 | Cln | GR3 | TS | up | TS | Cln NOT |
| | | GR1, 2 | % valid | GR3 | % valid | up | % valid | up | TS up |
| | Oligo | % up | up | % up | up | % up | up | % up | % valid |
| DEX ID | Name | n = 28 | n = 28 | n = 10 | n = 10 | n = 13 | n = 13 | n = 25 | up n = 25 |
| DEX0488_006.nt.1 | 31028 | 50.0 | 58.3 | 50.0 | 71.4 | 53.8 | 70.0 | 48.0 | 57.1 |
| DEX0488_006.nt.1 | 31029 | 53.6 | 60.0 | 60.0 | 75.0 | 53.8 | 70.0 | 56.0 | 60.9 |
| DEX0488_006.nt.1 | 31059 | 50.0 | 58.3 | 50.0 | 71.4 | 53.8 | 70.0 | 48.0 | 57.1 |
| DEX0488_011.nt.1 | 33840 | 71.4 | 71.4 | 80.0 | 80.0 | 84.6 | 84.6 | 68.0 | 68.0 |
| DEX0488_011.nt.1 | 33841 | 67.9 | 67.9 | 90.0 | 90.0 | 92.3 | 92.3 | 64.0 | 64.0 |
| DEX0488_011.nt.1 | 39927 | 75.0 | 75.0 | 80.0 | 80.0 | 84.6 | 84.6 | 72.0 | 72.0 |
| DEX0488_011.nt.1 | 39927.1 | 71.4 | 71.4 | 70.0 | 70.0 | 84.6 | 84.6 | 64.0 | 64.0 |
| DEX0488_011.nt.1 | 39928 | 67.9 | 67.9 | 80.0 | 80.0 | 84.6 | 84.6 | 64.0 | 64.0 |
| DEX0488_011.nt.1 | 39928.1 | 64.3 | 66.7 | 80.0 | 88.9 | 92.3 | 92.3 | 56.0 | 60.9 |
| DEX0488_012.nt.1 | 21187 | 0.0 | 0.0 | 0.0 | 0.0 | 0.0 | 0.0 | 0.0 | 0.0 |
| DEX0488_012.nt.1 | 21187.1 | 0.0 | 0.0 | 10.0 | 10.0 | 0.0 | 0.0 | 4.0 | 4.0 |
| DEX0488_012.nt.1 | 21188 | 0.0 | 0.0 | 0.0 | 0.0 | 0.0 | 0.0 | 0.0 | 0.0 |
| DEX0488_012.nt.1 | 21188.1 | 0.0 | 0.0 | 0.0 | 0.0 | 0.0 | 0.0 | 0.0 | 0.0 |
| DEX0488_015.nt.1 | 33870 | 14.3 | 14.3 | 0.0 | 0.0 | 15.4 | 15.4 | 8.0 | 8.0 |
| DEX0488_015.nt.2 | 33870 | 14.3 | 14.3 | 0.0 | 0.0 | 15.4 | 15.4 | 8.0 | 8.0 |
| DEX0488_015.nt.2 | 33871 | 14.3 | 14.3 | 0.0 | 0.0 | 15.4 | 15.4 | 8.0 | 8.0 |
| DEX0488_017.nt.1 | 31028 | 50.0 | 58.3 | 50.0 | 71.4 | 53.8 | 70.0 | 48.0 | 57.1 |
| DEX0488_017.nt.1 | 31029 | 53.6 | 60.0 | 60.0 | 75.0 | 53.8 | 70.0 | 56.0 | 60.9 |
| DEX0488_017.nt.1 | 31059 | 50.0 | 58.3 | 50.0 | 71.4 | 53.8 | 70.0 | 48.0 | 57.1 |
| DEX0488_021.nt.1 | 21187 | 0.0 | 0.0 | 0.0 | 0.0 | 0.0 | 0.0 | 0.0 | 0.0 |
| DEX0488_021.nt.1 | 21187.1 | 0.0 | 0.0 | 10.0 | 10.0 | 0.0 | 0.0 | 4.0 | 4.0 |
| DEX0488_021.nt.2 | 21187 | 0.0 | 0.0 | 0.0 | 0.0 | 0.0 | 0.0 | 0.0 | 0.0 |
| DEX0488_021.nt.2 | 21187.1 | 0.0 | 0.0 | 10.0 | 10.0 | 0.0 | 0.0 | 4.0 | 4.0 |
| DEX0488_024.nt.1 | 14344 | 0.0 | 0.0 | 0.0 | 0.0 | 0.0 | 0.0 | 0.0 | 0.0 |
| DEX0488_024.nt.1 | 14345 | 0.0 | 0.0 | 0.0 | 0.0 | 0.0 | 0.0 | 0.0 | 0.0 |
| DEX0488_024.nt.2 | 14344 | 0.0 | 0.0 | 0.0 | 0.0 | 0.0 | 0.0 | 0.0 | 0.0 |
| DEX0488_024.nt.2 | 14345 | 0.0 | 0.0 | 0.0 | 0.0 | 0.0 | 0.0 | 0.0 | 0.0 |
| DEX0488_026.nt.1 | 24160 | 0.0 | 0.0 | 0.0 | 0.0 | 0.0 | 0.0 | 0.0 | 0.0 |
| DEX0488_026.nt.1 | 24160.1 | 0.0 | 0.0 | 0.0 | 0.0 | 0.0 | 0.0 | 0.0 | 0.0 |
| DEX0488_027.nt.1 | 17852 | 78.6 | 78.6 | 70.0 | 70.0 | 92.3 | 92.3 | 68.0 | 68.0 |
| DEX0488_027.nt.1 | 17853 | 78.6 | 78.6 | 70.0 | 70.0 | 92.3 | 92.3 | 68.0 | 68.0 |
| DEX0488_027.nt.1 | 18644 | 75.0 | 75.0 | 70.0 | 70.0 | 84.6 | 84.6 | 68.0 | 68.0 |
| DEX0488_027.nt.1 | 18644.1 | 75.0 | 75.0 | 70.0 | 70.0 | 84.6 | 84.6 | 68.0 | 68.0 |
| DEX0488_027.nt.1 | 18645 | 78.6 | 78.6 | 70.0 | 70.0 | 92.3 | 92.3 | 68.0 | 68.0 |
| DEX0488_027.nt.1 | 18645.1 | 78.6 | 78.6 | 70.0 | 70.0 | 92.3 | 92.3 | 68.0 | 68.0 |
| DEX0488_027.nt.2 | 17852 | 78.6 | 78.6 | 70.0 | 70.0 | 92.3 | 92.3 | 68.0 | 68.0 |
| DEX0488_027.nt.2 | 17853 | 78.6 | 78.6 | 70.0 | 70.0 | 92.3 | 92.3 | 68.0 | 68.0 |
| DEX0488_027.nt.2 | 18644 | 75.0 | 75.0 | 70.0 | 70.0 | 84.6 | 84.6 | 68.0 | 68.0 |
| DEX0488_027.nt.2 | 18644.1 | 75.0 | 75.0 | 70.0 | 70.0 | 84.6 | 84.6 | 68.0 | 68.0 |
| DEX0488_027.nt.2 | 18645 | 78.6 | 78.6 | 70.0 | 70.0 | 92.3 | 92.3 | 68.0 | 68.0 |
| DEX0488_027.nt.2 | 18645.1 | 78.6 | 78.6 | 70.0 | 70.0 | 92.3 | 92.3 | 68.0 | 68.0 |
| DEX0488_027.nt.3 | 17852 | 78.6 | 78.6 | 70.0 | 70.0 | 92.3 | 92.3 | 68.0 | 68.0 |
| DEX0488_027.nt.3 | 17853 | 78.6 | 78.6 | 70.0 | 70.0 | 92.3 | 92.3 | 68.0 | 68.0 |
| DEX0488_027.nt.3 | 18644 | 75.0 | 75.0 | 70.0 | 70.0 | 84.6 | 84.6 | 68.0 | 68.0 |
| DEX0488_027.nt.3 | 18644.1 | 75.0 | 75.0 | 70.0 | 70.0 | 84.6 | 84.6 | 68.0 | 68.0 |
| DEX0488_027.nt.3 | 18645 | 78.6 | 78.6 | 70.0 | 70.0 | 92.3 | 92.3 | 68.0 | 68.0 |
| DEX0488_027.nt.3 | 18645.1 | 78.6 | 78.6 | 70.0 | 70.0 | 92.3 | 92.3 | 68.0 | 68.0 |
| DEX0488_027.nt.4 | 17852 | 78.6 | 78.6 | 70.0 | 70.0 | 92.3 | 92.3 | 68.0 | 68.0 |
| DEX0488_027.nt.4 | 17853 | 78.6 | 78.6 | 70.0 | 70.0 | 92.3 | 92.3 | 68.0 | 68.0 |
| DEX0488_027.nt.4 | 18644 | 75.0 | 75.0 | 70.0 | 70.0 | 84.6 | 84.6 | 68.0 | 68.0 |
| DEX0488_027.nt.4 | 18644.1 | 75.0 | 75.0 | 70.0 | 70.0 | 84.6 | 84.6 | 68.0 | 68.0 |
| DEX0488_027.nt.4 | 18645 | 78.6 | 78.6 | 70.0 | 70.0 | 92.3 | 92.3 | 68.0 | 68.0 |
| DEX0488_027.nt.4 | 18645.1 | 78.6 | 78.6 | 70.0 | 70.0 | 92.3 | 92.3 | 68.0 | 68.0 |
| DEX0488_028.nt.1 | 33088 | 0.0 | 0.0 | 0.0 | 0.0 | 0.0 | 0.0 | 0.0 | 0.0 |
| DEX0488_028.nt.1 | 33088.1 | 0.0 | 0.0 | 0.0 | 0.0 | 0.0 | 0.0 | 0.0 | 0.0 |
| DEX0488_030.nt.1 | 35317 | 0.0 | 0.0 | 0.0 | 0.0 | 0.0 | 0.0 | 0.0 | 0.0 |

[0498] TABLE 8

| | | Cln Cell | Cln Cell | Cln Cell | Cln Cell Lines |
|---|---|---|---|---|---|
| | Oligo | Lines % up | Lines % valid | Lines PMT | PMT 550 % valid |
| DEX ID | Name | n = 5 | up n = 5 | 550 % up n = 5 | up n = 5 |
| DEX0488_006.nt.1 | 31028 | 0.0 | 0.0 | 0.0 | 0.0 |
| DEX0488_006.nt.1 | 31029 | 0.0 | 0.0 | 0.0 | 0.0 |
| DEX0488_006.nt.1 | 31059 | 0.0 | 0.0 | 0.0 | 0.0 |
| DEX0488_011.nt.1 | 33840 | 80.0 | 80.0 | 60.0 | 60.0 |
| DEX0488_011.nt.1 | 33841 | 80.0 | 80.0 | 60.0 | 60.0 |
| DEX0488_011.nt.1 | 39927 | 60.0 | 60.0 | 40.0 | 40.0 |
| DEX0488_011.nt.1 | 39927.1 | 60.0 | 60.0 | 60.0 | 60.0 |
| DEX0488_011.nt.1 | 39928 | 60.0 | 60.0 | 60.0 | 60.0 |
| DEX0488_011.nt.1 | 39928.1 | 80.0 | 80.0 | 60.0 | 60.0 |
| DEX0488_012.nt.1 | 21187 | 0.0 | 0.0 | 0.0 | 0.0 |
| DEX0488_012.nt.1 | 21187.1 | 0.0 | 0.0 | 0.0 | 0.0 |
| DEX0488_012.nt.1 | 21188 | 0.0 | 0.0 | 0.0 | 0.0 |
| DEX0488_012.nt.1 | 21188.1 | 0.0 | 0.0 | 0.0 | 0.0 |
| DEX0488_015.nt.1 | 33870 | 0.0 | 0.0 | 0.0 | 0.0 |
| DEX0488_015.nt.2 | 33870 | 0.0 | 0.0 | 0.0 | 0.0 |
| DEX0488_015.nt.2 | 33871 | 0.0 | 0.0 | 0.0 | 0.0 |
| DEX0488_017.nt.1 | 31028 | 0.0 | 0.0 | 0.0 | 0.0 |
| DEX0488_017.nt.1 | 31029 | 0.0 | 0.0 | 0.0 | 0.0 |
| DEX0488_017.nt.1 | 31059 | 0.0 | 0.0 | 0.0 | 0.0 |
| DEX0488_021.nt.1 | 21187 | 0.0 | 0.0 | 0.0 | 0.0 |
| DEX0488_021.nt.1 | 21187.1 | 0.0 | 0.0 | 0.0 | 0.0 |
| DEX0488_021.nt.2 | 21187 | 0.0 | 0.0 | 0.0 | 0.0 |
| DEX0488_021.nt.2 | 21187.1 | 0.0 | 0.0 | 0.0 | 0.0 |
| DEX0488_024.nt.1 | 14344 | 0.0 | 0.0 | 0.0 | 0.0 |
| DEX0488_024.nt.1 | 14345 | 0.0 | 0.0 | 0.0 | 0.0 |
| DEX0488_024.nt.2 | 14344 | 0.0 | 0.0 | 0.0 | 0.0 |
| DEX0488_024.nt.2 | 14345 | 0.0 | 0.0 | 0.0 | 0.0 |
| DEX0488_026.nt.1 | 24160 | 0.0 | 0.0 | 0.0 | 0.0 |
| DEX0488_026.nt.1 | 24160.1 | 0.0 | 0.0 | 0.0 | 0.0 |
| DEX0488_027.nt.1 | 17852 | 20.0 | 20.0 | 20.0 | 20.0 |
| DEX0488_027.nt.1 | 17853 | 20.0 | 20.0 | 20.0 | 25.0 |
| DEX0488_027.nt.1 | 18644 | 20.0 | 20.0 | 20.0 | 20.0 |
| DEX0488_027.nt.1 | 18644.1 | 20.0 | 20.0 | 20.0 | 20.0 |
| DEX0488_027.nt.1 | 18645 | 20.0 | 25.0 | 20.0 | 25.0 |
| DEX0488_027.nt.1 | 18645.1 | 20.0 | 20.0 | 20.0 | 25.0 |
| DEX0488_027.nt.2 | 17852 | 20.0 | 20.0 | 20.0 | 20.0 |
| DEX0488_027.nt.2 | 17853 | 20.0 | 20.0 | 20.0 | 25.0 |
| DEX0488_027.nt.2 | 18644 | 20.0 | 20.0 | 20.0 | 20.0 |
| DEX0488_027.nt.2 | 18644.1 | 20.0 | 20.0 | 20.0 | 20.0 |
| DEX0488_027.nt.2 | 18645 | 20.0 | 25.0 | 20.0 | 25.0 |
| DEX0488_027.nt.2 | 18645.1 | 20.0 | 20.0 | 20.0 | 25.0 |
| DEX0488_027.nt.3 | 17852 | 20.0 | 20.0 | 20.0 | 20.0 |
| DEX0488_027.nt.3 | 17853 | 20.0 | 20.0 | 20.0 | 25.0 |
| DEX0488_027.nt.3 | 18644 | 20.0 | 20.0 | 20.0 | 20.0 |
| DEX0488_027.nt.3 | 18644.1 | 20.0 | 20.0 | 20.0 | 20.0 |
| DEX0488_027.nt.3 | 18645 | 20.0 | 25.0 | 20.0 | 25.0 |
| DEX0488_027.nt.3 | 18645.1 | 20.0 | 20.0 | 20.0 | 25.0 |
| DEX0488_027.nt.4 | 17852 | 20.0 | 20.0 | 20.0 | 20.0 |
| DEX0488_027.nt.4 | 17853 | 20.0 | 20.0 | 20.0 | 25.0 |
| DEX0488_027.nt.4 | 18644 | 20.0 | 20.0 | 20.0 | 20.0 |
| DEX0488_027.nt.4 | 18644.1 | 20.0 | 20.0 | 20.0 | 20.0 |
| DEX0488_027.nt.4 | 18645 | 20.0 | 25.0 | 20.0 | 25.0 |
| DEX0488_027.nt.4 | 18645.1 | 20.0 | 20.0 | 20.0 | 25.0 |
| DEX0488_028.nt.1 | 33088 | 0.0 | 0.0 | 0.0 | 0.0 |
| DEX0488_028.nt.1 | 33088.1 | 0.0 | 0.0 | 0.0 | 0.0 |
| DEX0488_030.nt.1 | 35317 | 0.0 | 0.0 | 0.0 | 0.0 |

[0499] TABLE 9

| | | | Cln | | Cln | | Cln |
|---|---|---|---|---|---|---|---|
| | | Cln | Multi- | Cln | Multi- | Cln | Multi- |
| | | Multi- | cancer | Multi- | cancer | Multi- | cancer |
| | | cancer | ALL | cancer | ASC | cancer | RS |
| | Oligo | ALL % up | % valid | ASC % up | % valid | RS % up | % valid |
| DEX ID | Name | n = 27 | up n = 27 | n = 14 | up n = 14 | n = 13 | up n = 13 |
| DEX0488_001.nt.1 | 79931 | 40.7 | 42.3 | 35.7 | 38.5 | 46.2 | 46.2 |
| DEX0488_001.nt.1 | 79931.1 | 48.1 | 50.0 | 50.0 | 50.0 | 46.2 | 50.0 |
| DEX0488_001.nt.1 | 79932 | 59.3 | 59.3 | 50.0 | 50.0 | 69.2 | 69.2 |
| DEX0488_001.nt.1 | 79932.1 | 59.3 | 59.3 | 50.0 | 50.0 | 69.2 | 69.2 |
| DEX0488_001.nt.10 | 79931 | 40.7 | 42.3 | 35.7 | 38.5 | 46.2 | 46.2 |
| DEX0488_001.nt.10 | 79931.1 | 48.1 | 50.0 | 50.0 | 50.0 | 46.2 | 50.0 |
| DEX0488_001.nt.10 | 79932 | 59.3 | 59.3 | 50.0 | 50.0 | 69.2 | 69.2 |
| DEX0488_001.nt.10 | 79932.1 | 59.3 | 59.3 | 50.0 | 50.0 | 69.2 | 69.2 |
| DEX0488_001.nt.11 | 79931 | 40.7 | 42.3 | 35.7 | 38.5 | 46.2 | 46.2 |
| DEX0488_001.nt.11 | 79931.1 | 48.1 | 50.0 | 50.0 | 50.0 | 46.2 | 50.0 |
| DEX0488_001.nt.11 | 79932 | 59.3 | 59.3 | 50.0 | 50.0 | 69.2 | 69.2 |
| DEX0488_001.nt.11 | 79932.1 | 59.3 | 59.3 | 50.0 | 50.0 | 69.2 | 69.2 |
| DEX0488_001.nt.2 | 79931 | 40.7 | 42.3 | 35.7 | 38.5 | 46.2 | 46.2 |
| DEX0488_001.nt.2 | 79931.1 | 48.1 | 50.0 | 50.0 | 50.0 | 46.2 | 50.0 |
| DEX0488_001.nt.2 | 79932 | 59.3 | 59.3 | 50.0 | 50.0 | 69.2 | 69.2 |
| DEX0488_001.nt.2 | 79932.1 | 59.3 | 59.3 | 50.0 | 50.0 | 69.2 | 69.2 |
| DEX0488_001.nt.3 | 79931 | 40.7 | 42.3 | 35.7 | 38.5 | 46.2 | 46.2 |
| DEX0488_001.nt.3 | 79931.1 | 48.1 | 50.0 | 50.0 | 50.0 | 46.2 | 50.0 |
| DEX0488_001.nt.3 | 79932 | 59.3 | 59.3 | 50.0 | 50.0 | 69.2 | 69.2 |
| DEX0488_001.nt.3 | 79932.1 | 59.3 | 59.3 | 50.0 | 50.0 | 69.2 | 69.2 |
| DEX0488_001.nt.4 | 79931 | 40.7 | 42.3 | 35.7 | 38.5 | 46.2 | 46.2 |
| DEX0488_001.nt.4 | 79931.1 | 48.1 | 50.0 | 50.0 | 50.0 | 46.2 | 50.0 |
| DEX0488_001.nt.4 | 79932 | 59.3 | 59.3 | 50.0 | 50.0 | 69.2 | 69.2 |
| DEX0488_001.nt.4 | 79932.1 | 59.3 | 59.3 | 50.0 | 50.0 | 69.2 | 69.2 |
| DEX0488_001.nt.5 | 79931 | 40.7 | 42.3 | 35.7 | 38.5 | 46.2 | 46.2 |
| DEX0488_001.nt.5 | 79931.1 | 48.1 | 50.0 | 50.0 | 50.0 | 46.2 | 50.0 |
| DEX0488_001.nt.5 | 79932 | 59.3 | 59.3 | 50.0 | 50.0 | 69.2 | 69.2 |
| DEX0488_001.nt.5 | 79932.1 | 59.3 | 59.3 | 50.0 | 50.0 | 69.2 | 69.2 |
| DEX0488_001.nt.6 | 79931 | 40.7 | 42.3 | 35.7 | 38.5 | 46.2 | 46.2 |
| DEX0488_001.nt.6 | 79931.1 | 48.1 | 50.0 | 50.0 | 50.0 | 46.2 | 50.0 |
| DEX0488_001.nt.6 | 79932 | 59.3 | 59.3 | 50.0 | 50.0 | 69.2 | 69.2 |
| DEX0488_001.nt.6 | 79932.1 | 59.3 | 59.3 | 50.0 | 50.0 | 69.2 | 69.2 |
| DEX0488_001.nt.7 | 79931 | 40.7 | 42.3 | 35.7 | 38.5 | 46.2 | 46.2 |
| DEX0488_001.nt.7 | 79931.1 | 48.1 | 50.0 | 50.0 | 50.0 | 46.2 | 50.0 |
| DEX0488_001.nt.7 | 79932 | 59.3 | 59.3 | 50.0 | 50.0 | 69.2 | 69.2 |
| DEX0488_001.nt.7 | 79932.1 | 59.3 | 59.3 | 50.0 | 50.0 | 69.2 | 69.2 |
| DEX0488_001.nt.8 | 79931 | 40.7 | 42.3 | 35.7 | 38.5 | 46.2 | 46.2 |
| DEX0488_001.nt.8 | 79931.1 | 48.1 | 50.0 | 50.0 | 50.0 | 46.2 | 50.0 |
| DEX0488_001.nt.8 | 79932 | 59.3 | 59.3 | 50.0 | 50.0 | 69.2 | 69.2 |
| DEX0488_001.nt.8 | 79932.1 | 59.3 | 59.3 | 50.0 | 50.0 | 69.2 | 69.2 |
| DEX0488_001.nt.9 | 79931 | 40.7 | 42.3 | 35.7 | 38.5 | 46.2 | 46.2 |
| DEX0488_001.nt.9 | 79931.1 | 48.1 | 50.0 | 50.0 | 50.0 | 46.2 | 50.0 |
| DEX0488_001.nt.9 | 79932 | 59.3 | 59.3 | 50.0 | 50.0 | 69.2 | 69.2 |
| DEX0488_001.nt.9 | 79932.1 | 59.3 | 59.3 | 50.0 | 50.0 | 69.2 | 69.2 |
| DEX0488_002.nt.1 | 91111 | 18.5 | 20.0 | 35.7 | 38.5 | 0.0 | 0.0 |
| DEX0488_002.nt.1 | 91111.1 | 22.2 | 23.1 | 35.7 | 35.7 | 7.7 | 8.3 |
| DEX0488_002.nt.1 | 91112 | 3.7 | 4.5 | 7.1 | 9.1 | 0.0 | 0.0 |
| DEX0488_002.nt.1 | 91112.1 | 3.7 | 4.5 | 7.1 | 10.0 | 0.0 | 0.0 |
| DEX0488_003.nt.1 | 27921 | 29.6 | 29.6 | 28.6 | 28.6 | 30.8 | 30.8 |
| DEX0488_003.nt.1 | 27921.1 | 29.6 | 29.6 | 28.6 | 28.6 | 30.8 | 30.8 |
| DEX0488_003.nt.1 | 27922 | 18.5 | 18.5 | 21.4 | 21.4 | 15.4 | 15.4 |
| DEX0488_003.nt.1 | 27922.1 | 29.6 | 29.6 | 28.6 | 28.6 | 30.8 | 30.8 |
| DEX0488_003.nt.1 | 78855 | 66.7 | 66.7 | 57.1 | 57.1 | 76.9 | 76.9 |
| DEX0488_003.nt.1 | 78855.1 | 66.7 | 66.7 | 57.1 | 57.1 | 76.9 | 76.9 |
| DEX0488_003.nt.1 | 78856 | 66.7 | 69.2 | 57.1 | 61.5 | 76.9 | 76.9 |
| DEX0488_003.nt.1 | 78856.1 | 63.0 | 63.0 | 57.1 | 57.1 | 69.2 | 69.2 |
| DEX0488_003.nt.2 | 27921 | 29.6 | 29.6 | 28.6 | 28.6 | 30.8 | 30.8 |
| DEX0488_003.nt.2 | 27921.1 | 29.6 | 29.6 | 28.6 | 28.6 | 30.8 | 30.8 |
| DEX0488_003.nt.2 | 27922 | 18.5 | 18.5 | 21.4 | 21.4 | 15.4 | 15.4 |
| DEX0488_003.nt.2 | 27922.1 | 29.6 | 29.6 | 28.6 | 28.6 | 30.8 | 30.8 |
| DEX0488_003.nt.2 | 78855 | 66.7 | 66.7 | 57.1 | 57.1 | 76.9 | 76.9 |
| DEX0488_003.nt.2 | 78855.1 | 66.7 | 66.7 | 57.1 | 57.1 | 76.9 | 76.9 |
| DEX0488_003.nt.2 | 78856 | 66.7 | 69.2 | 57.1 | 61.5 | 76.9 | 76.9 |
| DEX0488_003.nt.2 | 78856.1 | 63.0 | 63.0 | 57.1 | 57.1 | 69.2 | 69.2 |
| DEX0488_003.nt.3 | 27921 | 29.6 | 29.6 | 28.6 | 28.6 | 30.8 | 30.8 |
| DEX0488_003.nt.3 | 27921.1 | 29.6 | 29.6 | 28.6 | 28.6 | 30.8 | 30.8 |
| DEX0488_003.nt.3 | 27922 | 18.5 | 18.5 | 21.4 | 21.4 | 15.4 | 15.4 |
| DEX0488_003.nt.3 | 27922.1 | 29.6 | 29.6 | 28.6 | 28.6 | 30.8 | 30.8 |
| DEX0488_003.nt.3 | 78855 | 66.7 | 66.7 | 57.1 | 57.1 | 76.9 | 76.9 |
| DEX0488_003.nt.3 | 78855.1 | 66.7 | 66.7 | 57.1 | 57.1 | 76.9 | 76.9 |
| DEX0488_003.nt.3 | 78856 | 66.7 | 69.2 | 57.1 | 61.5 | 76.9 | 76.9 |
| DEX0488_003.nt.3 | 78856.1 | 63.0 | 63.0 | 57.1 | 57.1 | 69.2 | 69.2 |
| DEX0488_003.nt.4 | 27921 | 29.6 | 29.6 | 28.6 | 28.6 | 30.8 | 30.8 |
| DEX0488_003.nt.4 | 27921.1 | 29.6 | 29.6 | 28.6 | 28.6 | 30.8 | 30.8 |
| DEX0488_003.nt.4 | 27922 | 18.5 | 18.5 | 21.4 | 21.4 | 15.4 | 15.4 |
| DEX0488_003.nt.4 | 27922.1 | 29.6 | 29.6 | 28.6 | 28.6 | 30.8 | 30.8 |
| DEX0488_003.nt.4 | 78855 | 66.7 | 66.7 | 57.1 | 57.1 | 76.9 | 76.9 |
| DEX0488_003.nt.4 | 78855.1 | 66.7 | 66.7 | 57.1 | 57.1 | 76.9 | 76.9 |
| DEX0488_003.nt.4 | 78856 | 66.7 | 69.2 | 57.1 | 61.5 | 76.9 | 76.9 |
| DEX0488_003.nt.4 | 78856.1 | 63.0 | 63.0 | 57.1 | 57.1 | 69.2 | 69.2 |
| DEX0488_003.nt.5 | 27921 | 29.6 | 29.6 | 28.6 | 28.6 | 30.8 | 30.8 |
| DEX0488_003.nt.5 | 27921.1 | 29.6 | 29.6 | 28.6 | 28.6 | 30.8 | 30.8 |
| DEX0488_003.nt.5 | 27922 | 18.5 | 18.5 | 21.4 | 21.4 | 15.4 | 15.4 |
| DEX0488_003.nt.5 | 27922.1 | 29.6 | 29.6 | 28.6 | 28.6 | 30.8 | 30.8 |
| DEX0488_003.nt.5 | 78855 | 66.7 | 66.7 | 57.1 | 57.1 | 76.9 | 76.9 |
| DEX0488_003.nt.5 | 78855.1 | 66.7 | 66.7 | 57.1 | 57.1 | 76.9 | 76.9 |
| DEX0488_003.nt.5 | 78856 | 66.7 | 69.2 | 57.1 | 61.5 | 76.9 | 76.9 |
| DEX0488_003.nt.5 | 78856.1 | 63.0 | 63.0 | 57.1 | 57.1 | 69.2 | 69.2 |
| DEX0488_003.nt.6 | 27921 | 29.6 | 29.6 | 28.6 | 28.6 | 30.8 | 30.8 |
| DEX0488_003.nt.6 | 27921.1 | 29.6 | 29.6 | 28.6 | 28.6 | 30.8 | 30.8 |
| DEX0488_003.nt.6 | 27922 | 18.5 | 18.5 | 21.4 | 21.4 | 15.4 | 15.4 |
| DEX0488_003.nt.6 | 27922.1 | 29.6 | 29.6 | 28.6 | 28.6 | 30.8 | 30.8 |
| DEX0488_003.nt.6 | 78855 | 66.7 | 66.7 | 57.1 | 57.1 | 76.9 | 76.9 |
| DEX0488_003.nt.6 | 78855.1 | 66.7 | 66.7 | 57.1 | 57.1 | 76.9 | 76.9 |
| DEX0488_003.nt.6 | 78856 | 66.7 | 69.2 | 57.1 | 61.5 | 76.9 | 76.9 |
| DEX0488_003.nt.6 | 78856.1 | 63.0 | 63.0 | 57.1 | 57.1 | 69.2 | 69.2 |
| DEX0488_003.nt.7 | 78855 | 66.7 | 66.7 | 57.1 | 57.1 | 76.9 | 76.9 |
| DEX0488_003.nt.7 | 78855.1 | 66.7 | 66.7 | 57.1 | 57.1 | 76.9 | 76.9 |
| DEX0488_003.nt.7 | 78856 | 66.7 | 69.2 | 57.1 | 61.5 | 76.9 | 76.9 |
| DEX0488_003.nt.7 | 78856.1 | 63.0 | 63.0 | 57.1 | 57.1 | 69.2 | 69.2 |
| DEX0488_004.nt.1 | 10666 | 37.0 | 38.5 | 50.0 | 53.8 | 23.1 | 23.1 |
| DEX0488_004.nt.1 | 10666.1 | 40.7 | 40.7 | 50.0 | 50.0 | 30.8 | 30.8 |
| DEX0488_004.nt.1 | 10667 | 44.4 | 44.4 | 57.1 | 57.1 | 30.8 | 30.8 |
| DEX0488_004.nt.1 | 10667.1 | 48.1 | 48.1 | 57.1 | 57.1 | 38.5 | 38.5 |
| DEX0488_005.nt.1 | 9744 | 14.8 | 15.4 | 14.3 | 15.4 | 15.4 | 15.4 |
| DEX0488_005.nt.1 | 9744.1 | 11.1 | 11.5 | 7.1 | 7.7 | 15.4 | 15.4 |
| DEX0488_005.nt.1 | 9745 | 22.2 | 22.2 | 14.3 | 14.3 | 30.8 | 30.8 |
| DEX0488_005.nt.1 | 9745.1 | 18.5 | 19.2 | 14.3 | 15.4 | 23.1 | 23.1 |
| DEX0488_006.nt.1 | 4353 | 55.6 | 62.5 | 64.3 | 75.0 | 46.2 | 50.0 |
| DEX0488_006.nt.1 | 4353.1 | 55.6 | 62.5 | 64.3 | 75.0 | 46.2 | 50.0 |
| DEX0488_006.nt.1 | 5804 | 55.6 | 62.5 | 64.3 | 75.0 | 46.2 | 50.0 |
| DEX0488_006.nt.1 | 5804.1 | 51.9 | 58.3 | 64.3 | 75.0 | 38.5 | 41.7 |
| DEX0488_006.nt.1 | 5804.2 | 51.9 | 58.3 | 64.3 | 75.0 | 38.5 | 41.7 |
| DEX0488_006.nt.1 | 92287 | 55.6 | 62.5 | 64.3 | 75.0 | 46.2 | 50.0 |
| DEX0488_006.nt.1 | 92287.1 | 51.9 | 56.0 | 64.3 | 75.0 | 38.5 | 38.5 |
| DEX0488_007.nt.1 | 41955 | 77.8 | 77.8 | 85.7 | 85.7 | 69.2 | 69.2 |
| DEX0488_007.nt.1 | 41955.1 | 81.5 | 81.5 | 85.7 | 85.7 | 76.9 | 76.9 |
| DEX0488_007.nt.1 | 41955.2 | 81.5 | 81.5 | 85.7 | 85.7 | 76.9 | 76.9 |
| DEX0488_007.nt.1 | 41955.3 | 77.8 | 77.8 | 85.7 | 85.7 | 69.2 | 69.2 |
| DEX0488_007.nt.1 | 41955.4 | 81.5 | 81.5 | 85.7 | 85.7 | 76.9 | 76.9 |
| DEX0488_007.nt.1 | 41956 | 74.1 | 74.1 | 85.7 | 85.7 | 61.5 | 61.5 |
| DEX0488_007.nt.1 | 41956.1 | 51.9 | 82.4 | 64.3 | 90.0 | 38.5 | 71.4 |
| DEX0488_007.nt.1 | 41956.2 | 77.8 | 77.8 | 85.7 | 85.7 | 69.2 | 69.2 |
| DEX0488_007.nt.1 | 41956.3 | 81.5 | 81.5 | 85.7 | 85.7 | 76.9 | 76.9 |
| DEX0488_007.nt.1 | 41956.4 | 81.5 | 81.5 | 85.7 | 85.7 | 76.9 | 76.9 |
| DEX0488_008.nt.1 | 17292 | 3.7 | 5.9 | 7.1 | 10.0 | 0.0 | 0.0 |
| DEX0488_008.nt.1 | 17292.1 | 3.7 | 5.6 | 7.1 | 10.0 | 0.0 | 0.0 |
| DEX0488_008.nt.1 | 17293 | 0.0 | 0.0 | 0.0 | 0.0 | 0.0 | 0.0 |
| DEX0488_008.nt.1 | 17293.1 | 0.0 | 0.0 | 0.0 | 0.0 | 0.0 | 0.0 |
| DEX0488_008.nt.1 | 2085 | 0.0 | 0.0 | 0.0 | 0.0 | 0.0 | 0.0 |
| DEX0488_008.nt.1 | 24404 | 3.7 | 7.1 | 7.1 | 11.1 | 0.0 | 0.0 |
| DEX0488_008.nt.1 | 24404.1 | 7.4 | 12.5 | 7.1 | 10.0 | 7.7 | 16.7 |
| DEX0488_008.nt.1 | 24405 | 0.0 | 0.0 | 0.0 | 0.0 | 0.0 | 0.0 |
| DEX0488_008.nt.1 | 24405.1 | 0.0 | 0.0 | 0.0 | 0.0 | 0.0 | 0.0 |
| DEX0488_008.nt.1 | 4909 | 0.0 | 0.0 | 0.0 | 0.0 | 0.0 | 0.0 |
| DEX0488_008.nt.1 | 4909.1 | 7.4 | 11.1 | 7.1 | 10.0 | 7.7 | 12.5 |
| DEX0488_008.nt.1 | 4910 | 0.0 | 0.0 | 0.0 | 0.0 | 0.0 | 0.0 |
| DEX0488_008.nt.1 | 4910.1 | 0.0 | 0.0 | 0.0 | 0.0 | 0.0 | 0.0 |
| DEX0488_008.nt.2 | 17292 | 3.7 | 5.9 | 7.1 | 10.0 | 0.0 | 0.0 |
| DEX0488_008.nt.2 | 17292.1 | 3.7 | 5.6 | 7.1 | 10.0 | 0.0 | 0.0 |
| DEX0488_008.nt.2 | 17293 | 0.0 | 0.0 | 0.0 | 0.0 | 0.0 | 0.0 |
| DEX0488_008.nt.2 | 17293.1 | 0.0 | 0.0 | 0.0 | 0.0 | 0.0 | 0.0 |
| DEX0488_008.nt.2 | 2085 | 0.0 | 0.0 | 0.0 | 0.0 | 0.0 | 0.0 |
| DEX0488_008.nt.2 | 24404 | 3.7 | 7.1 | 7.1 | 11.1 | 0.0 | 0.0 |
| DEX0488_008.nt.2 | 24404.1 | 7.4 | 12.5 | 7.1 | 10.0 | 7.7 | 16.7 |
| DEX0488_008.nt.2 | 24405 | 0.0 | 0.0 | 0.0 | 0.0 | 0.0 | 0.0 |
| DEX0488_008.nt.2 | 24405.1 | 0.0 | 0.0 | 0.0 | 0.0 | 0.0 | 0.0 |
| DEX0488_008.nt.2 | 4909 | 0.0 | 0.0 | 0.0 | 0.0 | 0.0 | 0.0 |
| DEX0488_008.nt.2 | 4909.1 | 7.4 | 11.1 | 7.1 | 10.0 | 7.7 | 12.5 |
| DEX0488_008.nt.2 | 4910 | 0.0 | 0.0 | 0.0 | 0.0 | 0.0 | 0.0 |
| DEX0488_008.nt.2 | 4910.1 | 0.0 | 0.0 | 0.0 | 0.0 | 0.0 | 0.0 |
| DEX0488_009.nt.1 | 79339 | 11.1 | 12.0 | 21.4 | 21.4 | 0.0 | 0.0 |
| DEX0488_009.nt.1 | 79339.1 | 11.1 | 13.0 | 21.4 | 23.1 | 0.0 | 0.0 |
| DEX0488_010.nt.1 | 26770 | 11.1 | 11.1 | 14.3 | 14.3 | 7.7 | 7.7 |
| DEX0488_010.nt.1 | 26770.1 | 11.1 | 11.1 | 14.3 | 14.3 | 7.7 | 7.7 |
| DEX0488_011.nt.1 | 33840 | 77.8 | 80.8 | 71.4 | 76.9 | 84.6 | 84.6 |
| DEX0488_011.nt.1 | 33840.1 | 74.1 | 76.9 | 71.4 | 71.4 | 76.9 | 83.3 |
| DEX0488_011.nt.1 | 33841 | 77.8 | 77.8 | 71.4 | 71.4 | 84.6 | 84.6 |
| DEX0488_011.nt.1 | 33841.1 | 74.1 | 74.1 | 71.4 | 71.4 | 76.9 | 76.9 |
| DEX0488_011.nt.1 | 39927 | 77.8 | 77.8 | 71.4 | 71.4 | 84.6 | 84.6 |
| DEX0488_011.nt.1 | 39927.1 | 77.8 | 80.8 | 71.4 | 71.4 | 84.6 | 91.7 |
| DEX0488_011.nt.1 | 39927.2 | 81.5 | 81.5 | 71.4 | 71.4 | 92.3 | 92.3 |
| DEX0488_011.nt.1 | 39927.3 | 77.8 | 77.8 | 71.4 | 71.4 | 84.6 | 84.6 |
| DEX0488_011.nt.1 | 39927.4 | 77.8 | 77.8 | 71.4 | 71.4 | 84.6 | 84.6 |
| DEX0488_011.nt.1 | 39928 | 74.1 | 74.1 | 71.4 | 71.4 | 76.9 | 76.9 |
| DEX0488_011.nt.1 | 39928.1 | 70.4 | 70.4 | 71.4 | 71.4 | 69.2 | 69.2 |
| DEX0488_011.nt.1 | 39928.2 | 77.8 | 77.8 | 71.4 | 71.4 | 84.6 | 84.6 |
| DEX0488_011.nt.1 | 39928.3 | 77.8 | 77.8 | 71.4 | 71.4 | 84.6 | 84.6 |
| DEX0488_011.nt.1 | 39928.4 | 74.1 | 74.1 | 71.4 | 71.4 | 76.9 | 76.9 |
| DEX0488_012.nt.1 | 21187 | 3.7 | 3.7 | 7.1 | 7.1 | 0.0 | 0.0 |
| DEX0488_012.nt.1 | 21187.1 | 3.7 | 3.7 | 7.1 | 7.1 | 0.0 | 0.0 |
| DEX0488_012.nt.1 | 21188 | 3.7 | 3.7 | 7.1 | 7.1 | 0.0 | 0.0 |
| DEX0488_012.nt.1 | 21188.1 | 3.7 | 3.7 | 7.1 | 7.1 | 0.0 | 0.0 |
| DEX0488_012.nt.1 | 78927 | 7.4 | 7.4 | 14.3 | 14.3 | 0.0 | 0.0 |
| DEX0488_012.nt.1 | 78927.1 | 7.4 | 7.4 | 14.3 | 14.3 | 0.0 | 0.0 |
| DEX0488_013.nt.1 | 79955 | 3.7 | 3.7 | 0.0 | 0.0 | 7.7 | 7.7 |
| DEX0488_013.nt.1 | 79955.1 | 3.7 | 3.7 | 7.1 | 7.1 | 0.0 | 0.0 |
| DEX0488_013.nt.1 | 79956 | 7.4 | 7.4 | 14.3 | 14.3 | 0.0 | 0.0 |
| DEX0488_013.nt.1 | 79956.1 | 7.4 | 7.4 | 14.3 | 14.3 | 0.0 | 0.0 |
| DEX0488_013.nt.1 | 79959 | 11.1 | 11.1 | 21.4 | 21.4 | 0.0 | 0.0 |
| DEX0488_013.nt.1 | 79959.1 | 11.1 | 11.5 | 21.4 | 21.4 | 0.0 | 0.0 |
| DEX0488_013.nt.1 | 79960 | 11.1 | 11.1 | 21.4 | 21.4 | 0.0 | 0.0 |
| DEX0488_013.nt.1 | 79960.1 | 14.8 | 14.8 | 21.4 | 21.4 | 7.7 | 7.7 |
| DEX0488_013.nt.1 | 79963 | 7.4 | 7.7 | 14.3 | 15.4 | 0.0 | 0.0 |
| DEX0488_013.nt.1 | 79963.1 | 7.4 | 7.4 | 14.3 | 14.3 | 0.0 | 0.0 |
| DEX0488_013.nt.1 | 79964 | 7.4 | 7.7 | 14.3 | 15.4 | 0.0 | 0.0 |
| DEX0488_013.nt.1 | 79964.1 | 7.4 | 7.4 | 14.3 | 14.3 | 0.0 | 0.0 |
| DEX0488_013.nt.2 | 79959 | 11.1 | 11.1 | 21.4 | 21.4 | 0.0 | 0.0 |
| DEX0488_013.nt.2 | 79959.1 | 11.1 | 11.5 | 21.4 | 21.4 | 0.0 | 0.0 |
| DEX0488_013.nt.2 | 79960 | 11.1 | 11.1 | 21.4 | 21.4 | 0.0 | 0.0 |
| DEX0488_013.nt.2 | 79960.1 | 14.8 | 14.8 | 21.4 | 21.4 | 7.7 | 7.7 |
| DEX0488_014.nt.1 | 90171 | 7.4 | 7.7 | 14.3 | 15.4 | 0.0 | 0.0 |
| DEX0488_014.nt.1 | 90171.1 | 7.4 | 7.4 | 14.3 | 14.3 | 0.0 | 0.0 |
| DEX0488_014.nt.1 | 90172 | 0.0 | 0.0 | 0.0 | 0.0 | 0.0 | 0.0 |
| DEX0488_014.nt.1 | 90172.1 | 7.4 | 7.4 | 14.3 | 14.3 | 0.0 | 0.0 |
| DEX0488_014.nt.2 | 90171 | 7.4 | 7.7 | 14.3 | 15.4 | 0.0 | 0.0 |
| DEX0488_014.nt.2 | 90171.1 | 7.4 | 7.4 | 14.3 | 14.3 | 0.0 | 0.0 |
| DEX0488_014.nt.2 | 90172 | 0.0 | 0.0 | 0.0 | 0.0 | 0.0 | 0.0 |
| DEX0488_014.nt.2 | 90172.1 | 7.4 | 7.4 | 14.3 | 14.3 | 0.0 | 0.0 |
| DEX0488_014.nt.3 | 90171 | 7.4 | 7.7 | 14.3 | 15.4 | 0.0 | 0.0 |
| DEX0488_014.nt.3 | 90171.1 | 7.4 | 7.4 | 14.3 | 14.3 | 0.0 | 0.0 |
| DEX0488_014.nt.3 | 90172 | 0.0 | 0.0 | 0.0 | 0.0 | 0.0 | 0.0 |
| DEX0488_014.nt.3 | 90172.1 | 7.4 | 7.4 | 14.3 | 14.3 | 0.0 | 0.0 |
| DEX0488_014.nt.4 | 90171 | 7.4 | 7.7 | 14.3 | 15.4 | 0.0 | 0.0 |
| DEX0488_014.nt.4 | 90171.1 | 7.4 | 7.4 | 14.3 | 14.3 | 0.0 | 0.0 |
| DEX0488_014.nt.4 | 90172 | 0.0 | 0.0 | 0.0 | 0.0 | 0.0 | 0.0 |
| DEX0488_014.nt.4 | 90172.1 | 7.4 | 7.4 | 14.3 | 14.3 | 0.0 | 0.0 |
| DEX0488_015.nt.1 | 78631 | 22.2 | 22.2 | 14.3 | 14.3 | 30.8 | 30.8 |
| DEX0488_015.nt.1 | 78631.1 | 22.2 | 22.2 | 14.3 | 14.3 | 30.8 | 30.8 |
| DEX0488_015.nt.1 | 78632 | 7.4 | 7.4 | 0.0 | 0.0 | 15.4 | 15.4 |
| DEX0488_015.nt.1 | 78632.1 | 7.4 | 7.4 | 0.0 | 0.0 | 15.4 | 15.4 |
| DEX0488_015.nt.2 | 78631 | 22.2 | 22.2 | 14.3 | 14.3 | 30.8 | 30.8 |
| DEX0488_015.nt.2 | 78631.1 | 22.2 | 22.2 | 14.3 | 14.3 | 30.8 | 30.8 |
| DEX0488_015.nt.2 | 78632 | 7.4 | 7.4 | 0.0 | 0.0 | 15.4 | 15.4 |
| DEX0488_015.nt.2 | 78632.1 | 7.4 | 7.4 | 0.0 | 0.0 | 15.4 | 15.4 |
| DEX0488_016.nt.1 | 79660 | 7.4 | 8.7 | 7.1 | 9.1 | 7.7 | 8.3 |
| DEX0488_016.nt.1 | 79660.1 | 7.4 | 7.4 | 7.1 | 7.1 | 7.7 | 7.7 |
| DEX0488_016.nt.10 | 79659 | 3.7 | 7.7 | 7.1 | 10.0 | 0.0 | 0.0 |
| DEX0488_016.nt.10 | 79659.1 | 3.7 | 16.7 | 7.1 | 20.0 | 0.0 | 0.0 |
| DEX0488_016.nt.10 | 79660 | 7.4 | 8.7 | 7.1 | 9.1 | 7.7 | 8.3 |
| DEX0488_016.nt.10 | 79660.1 | 7.4 | 7.4 | 7.1 | 7.1 | 7.7 | 7.7 |
| DEX0488_016.nt.11 | 79659 | 3.7 | 7.7 | 7.1 | 10.0 | 0.0 | 0.0 |
| DEX0488_016.nt.11 | 79659.1 | 3.7 | 16.7 | 7.1 | 20.0 | 0.0 | 0.0 |
| DEX0488_016.nt.11 | 79660 | 7.4 | 8.7 | 7.1 | 9.1 | 7.7 | 8.3 |
| DEX0488_016.nt.11 | 79660.1 | 7.4 | 7.4 | 7.1 | 7.1 | 7.7 | 7.7 |
| DEX0488_016.nt.2 | 79660 | 7.4 | 8.7 | 7.1 | 9.1 | 7.7 | 8.3 |
| DEX0488_016.nt.2 | 79660.1 | 7.4 | 7.4 | 7.1 | 7.1 | 7.7 | 7.7 |
| DEX0488_016.nt.3 | 79660 | 7.4 | 8.7 | 7.1 | 9.1 | 7.7 | 8.3 |
| DEX0488_016.nt.3 | 79660.1 | 7.4 | 7.4 | 7.1 | 7.1 | 7.7 | 7.7 |
| DEX0488_016.nt.4 | 79660 | 7.4 | 8.7 | 7.1 | 9.1 | 7.7 | 8.3 |
| DEX0488_016.nt.4 | 79660.1 | 7.4 | 7.4 | 7.1 | 7.1 | 7.7 | 7.7 |
| DEX0488_016.nt.5 | 79660 | 7.4 | 8.7 | 7.1 | 9.1 | 7.7 | 8.3 |
| DEX0488_016.nt.5 | 79660.1 | 7.4 | 7.4 | 7.1 | 7.1 | 7.7 | 7.7 |
| DEX0488_016.nt.6 | 79660 | 7.4 | 8.7 | 7.1 | 9.1 | 7.7 | 8.3 |
| DEX0488_016.nt.6 | 79660.1 | 7.4 | 7.4 | 7.1 | 7.1 | 7.7 | 7.7 |
| DEX0488_016.nt.7 | 79660 | 7.4 | 8.7 | 7.1 | 9.1 | 7.7 | 8.3 |
| DEX0488_016.nt.7 | 79660.1 | 7.4 | 7.4 | 7.1 | 7.1 | 7.7 | 7.7 |
| DEX0488_016.nt.8 | 79660 | 7.4 | 8.7 | 7.1 | 9.1 | 7.7 | 8.3 |
| DEX0488_016.nt.8 | 79660.1 | 7.4 | 7.4 | 7.1 | 7.1 | 7.7 | 7.7 |
| DEX0488_016.nt.9 | 79660 | 7.4 | 8.7 | 7.1 | 9.1 | 7.7 | 8.3 |
| DEX0488_016.nt.9 | 79660.1 | 7.4 | 7.4 | 7.1 | 7.1 | 7.7 | 7.7 |
| DEX0488_017.nt.1 | 4353 | 55.6 | 62.5 | 64.3 | 75.0 | 46.2 | 50.0 |
| DEX0488_017.nt.1 | 4353.1 | 55.6 | 62.5 | 64.3 | 75.0 | 46.2 | 50.0 |
| DEX0488_017.nt.1 | 5804 | 55.6 | 62.5 | 64.3 | 75.0 | 46.2 | 50.0 |
| DEX0488_017.nt.1 | 5804.1 | 51.9 | 58.3 | 64.3 | 75.0 | 38.5 | 41.7 |
| DEX0488_017.nt.1 | 5804.2 | 51.9 | 58.3 | 64.3 | 75.0 | 38.5 | 41.7 |
| DEX0488_017.nt.1 | 92287 | 55.6 | 62.5 | 64.3 | 75.0 | 46.2 | 50.0 |
| DEX0488_017.nt.1 | 92287.1 | 51.9 | 56.0 | 64.3 | 75.0 | 38.5 | 38.5 |
| DEX0488_018.nt.1 | 79936 | 37.0 | 37.0 | 35.7 | 35.7 | 38.5 | 38.5 |
| DEX0488_018.nt.1 | 79936.1 | 33.3 | 34.6 | 35.7 | 35.7 | 30.8 | 33.3 |
| DEX0488_018.nt.1 | 79944 | 33.3 | 34.6 | 35.7 | 35.7 | 30.8 | 33.3 |
| DEX0488_018.nt.1 | 79944.1 | 37.0 | 41.7 | 28.6 | 33.3 | 46.2 | 50.0 |
| DEX0488_018.nt.2 | 79936 | 37.0 | 37.0 | 35.7 | 35.7 | 38.5 | 38.5 |
| DEX0488_018.nt.2 | 79936.1 | 33.3 | 34.6 | 35.7 | 35.7 | 30.8 | 33.3 |
| DEX0488_018.nt.2 | 79944 | 33.3 | 34.6 | 35.7 | 35.7 | 30.8 | 33.3 |
| DEX0488_018.nt.2 | 79944.1 | 37.0 | 41.7 | 28.6 | 33.3 | 46.2 | 50.0 |
| DEX0488_018.nt.3 | 79936 | 37.0 | 37.0 | 35.7 | 35.7 | 38.5 | 38.5 |
| DEX0488_018.nt.3 | 79936.1 | 33.3 | 34.6 | 35.7 | 35.7 | 30.8 | 33.3 |
| DEX0488_018.nt.3 | 79944 | 33.3 | 34.6 | 35.7 | 35.7 | 30.8 | 33.3 |
| DEX0488_018.nt.3 | 79944.1 | 37.0 | 41.7 | 28.6 | 33.3 | 46.2 | 50.0 |
| DEX0488_018.nt.4 | 79936 | 37.0 | 37.0 | 35.7 | 35.7 | 38.5 | 38.5 |
| DEX0488_018.nt.4 | 79936.1 | 33.3 | 34.6 | 35.7 | 35.7 | 30.8 | 33.3 |
| DEX0488_018.nt.4 | 79944 | 33.3 | 34.6 | 35.7 | 35.7 | 30.8 | 33.3 |
| DEX0488_018.nt.4 | 79944.1 | 37.0 | 41.7 | 28.6 | 33.3 | 46.2 | 50.0 |
| DEX0488_018.nt.5 | 79936 | 37.0 | 37.0 | 35.7 | 35.7 | 38.5 | 38.5 |
| DEX0488_018.nt.5 | 79936.1 | 33.3 | 34.6 | 35.7 | 35.7 | 30.8 | 33.3 |
| DEX0488_018.nt.5 | 79944 | 33.3 | 34.6 | 35.7 | 35.7 | 30.8 | 33.3 |
| DEX0488_018.nt.5 | 79944.1 | 37.0 | 41.7 | 28.6 | 33.3 | 46.2 | 50.0 |
| DEX0488_018.nt.6 | 79936 | 37.0 | 37.0 | 35.7 | 35.7 | 38.5 | 38.5 |
| DEX0488_018.nt.6 | 79936.1 | 33.3 | 34.6 | 35.7 | 35.7 | 30.8 | 33.3 |
| DEX0488_018.nt.6 | 79944 | 33.3 | 34.6 | 35.7 | 35.7 | 30.8 | 33.3 |
| DEX0488_018.nt.6 | 79944.1 | 37.0 | 41.7 | 28.6 | 33.3 | 46.2 | 50.0 |
| DEX0488_018.nt.7 | 79936 | 37.0 | 37.0 | 35.7 | 35.7 | 38.5 | 38.5 |
| DEX0488_018.nt.7 | 79936.1 | 33.3 | 34.6 | 35.7 | 35.7 | 30.8 | 33.3 |
| DEX0488_018.nt.7 | 79944 | 33.3 | 34.6 | 35.7 | 35.7 | 30.8 | 33.3 |
| DEX0488_018.nt.7 | 79944.1 | 37.0 | 41.7 | 28.6 | 33.3 | 46.2 | 50.0 |
| DEX0488_018.nt.8 | 79936 | 37.0 | 37.0 | 35.7 | 35.7 | 38.5 | 38.5 |
| DEX0488_018.nt.8 | 79936.1 | 33.3 | 34.6 | 35.7 | 35.7 | 30.8 | 33.3 |
| DEX0488_018.nt.8 | 79944 | 33.3 | 34.6 | 35.7 | 35.7 | 30.8 | 33.3 |
| DEX0488_018.nt.8 | 79944.1 | 37.0 | 41.7 | 28.6 | 33.3 | 46.2 | 50.0 |
| DEX0488_019.nt.1 | 79955 | 3.7 | 3.7 | 0.0 | 0.0 | 7.7 | 7.7 |
| DEX0488_019.nt.1 | 79955.1 | 3.7 | 3.7 | 7.1 | 7.1 | 0.0 | 0.0 |
| DEX0488_019.nt.1 | 79956 | 7.4 | 7.4 | 14.3 | 14.3 | 0.0 | 0.0 |
| DEX0488_019.nt.1 | 79956.1 | 7.4 | 7.4 | 14.3 | 14.3 | 0.0 | 0.0 |
| DEX0488_019.nt.1 | 79959 | 11.1 | 11.1 | 21.4 | 21.4 | 0.0 | 0.0 |
| DEX0488_019.nt.1 | 79959.1 | 11.1 | 11.5 | 21.4 | 21.4 | 0.0 | 0.0 |
| DEX0488_019.nt.1 | 79960 | 11.1 | 11.1 | 21.4 | 21.4 | 0.0 | 0.0 |
| DEX0488_019.nt.1 | 79960.1 | 14.8 | 14.8 | 21.4 | 21.4 | 7.7 | 7.7 |
| DEX0488_019.nt.1 | 79963 | 7.4 | 7.7 | 14.3 | 15.4 | 0.0 | 0.0 |
| DEX0488_019.nt.1 | 79963.1 | 7.4 | 7.4 | 14.3 | 14.3 | 0.0 | 0.0 |
| DEX0488_019.nt.1 | 79964 | 7.4 | 7.7 | 14.3 | 15.4 | 0.0 | 0.0 |
| DEX0488_019.nt.1 | 79964.1 | 7.4 | 7.4 | 14.3 | 14.3 | 0.0 | 0.0 |
| DEX0488_019.nt.2 | 79955 | 3.7 | 3.7 | 0.0 | 0.0 | 7.7 | 7.7 |
| DEX0488_019.nt.2 | 79955.1 | 3.7 | 3.7 | 7.1 | 7.1 | 0.0 | 0.0 |
| DEX0488_019.nt.2 | 79956 | 7.4 | 7.4 | 14.3 | 14.3 | 0.0 | 0.0 |
| DEX0488_019.nt.2 | 79956.1 | 7.4 | 7.4 | 14.3 | 14.3 | 0.0 | 0.0 |
| DEX0488_019.nt.2 | 79959 | 11.1 | 11.1 | 21.4 | 21.4 | 0.0 | 0.0 |
| DEX0488_019.nt.2 | 79959.1 | 11.1 | 11.5 | 21.4 | 21.4 | 0.0 | 0.0 |
| DEX0488_019.nt.2 | 79960 | 11.1 | 11.1 | 21.4 | 21.4 | 0.0 | 0.0 |
| DEX0488_019.nt.2 | 79960.1 | 14.8 | 14.8 | 21.4 | 21.4 | 7.7 | 7.7 |
| DEX0488_019.nt.2 | 79963 | 7.4 | 7.7 | 14.3 | 15.4 | 0.0 | 0.0 |
| DEX0488_019.nt.2 | 79963.1 | 7.4 | 7.4 | 14.3 | 14.3 | 0.0 | 0.0 |
| DEX0488_019.nt.2 | 79964 | 7.4 | 7.7 | 14.3 | 15.4 | 0.0 | 0.0 |
| DEX0488_019.nt.2 | 79964.1 | 7.4 | 7.4 | 14.3 | 14.3 | 0.0 | 0.0 |
| DEX0488_019.nt.3 | 79955 | 3.7 | 3.7 | 0.0 | 0.0 | 7.7 | 7.7 |
| DEX0488_019.nt.3 | 79955.1 | 3.7 | 3.7 | 7.1 | 7.1 | 0.0 | 0.0 |
| DEX0488_019.nt.3 | 79956 | 7.4 | 7.4 | 14.3 | 14.3 | 0.0 | 0.0 |
| DEX0488_019.nt.3 | 79956.1 | 7.4 | 7.4 | 14.3 | 14.3 | 0.0 | 0.0 |
| DEX0488_019.nt.3 | 79959 | 11.1 | 11.1 | 21.4 | 21.4 | 0.0 | 0.0 |
| DEX0488_019.nt.3 | 79959.1 | 11.1 | 11.5 | 21.4 | 21.4 | 0.0 | 0.0 |
| DEX0488_019.nt.3 | 79960 | 11.1 | 11.1 | 21.4 | 21.4 | 0.0 | 0.0 |
| DEX0488_019.nt.3 | 79960.1 | 14.8 | 14.8 | 21.4 | 21.4 | 7.7 | 7.7 |
| DEX0488_019.nt.3 | 79963 | 7.4 | 7.7 | 14.3 | 15.4 | 0.0 | 0.0 |
| DEX0488_019.nt.3 | 79963.1 | 7.4 | 7.4 | 14.3 | 14.3 | 0.0 | 0.0 |
| DEX0488_019.nt.3 | 79964 | 7.4 | 7.7 | 14.3 | 15.4 | 0.0 | 0.0 |
| DEX0488_019.nt.3 | 79964.1 | 7.4 | 7.4 | 14.3 | 14.3 | 0.0 | 0.0 |
| DEX0488_019.nt.4 | 79955 | 3.7 | 3.7 | 0.0 | 0.0 | 7.7 | 7.7 |
| DEX0488_019.nt.4 | 79955.1 | 3.7 | 3.7 | 7.1 | 7.1 | 0.0 | 0.0 |
| DEX0488_019.nt.4 | 79956 | 7.4 | 7.4 | 14.3 | 14.3 | 0.0 | 0.0 |
| DEX0488_019.nt.4 | 79956.1 | 7.4 | 7.4 | 14.3 | 14.3 | 0.0 | 0.0 |
| DEX0488_019.nt.4 | 79959 | 11.1 | 11.1 | 21.4 | 21.4 | 0.0 | 0.0 |
| DEX0488_019.nt.4 | 79959.1 | 11.1 | 11.5 | 21.4 | 21.4 | 0.0 | 0.0 |
| DEX0488_019.nt.4 | 79960 | 11.1 | 11.1 | 21.4 | 21.4 | 0.0 | 0.0 |
| DEX0488_019.nt.4 | 79960.1 | 14.8 | 14.8 | 21.4 | 21.4 | 7.7 | 7.7 |
| DEX0488_019.nt.4 | 79963 | 7.4 | 7.7 | 14.3 | 15.4 | 0.0 | 0.0 |
| DEX0488_019.nt.4 | 79963.1 | 7.4 | 7.4 | 14.3 | 14.3 | 0.0 | 0.0 |
| DEX0488_019.nt.4 | 79964 | 7.4 | 7.7 | 14.3 | 15.4 | 0.0 | 0.0 |
| DEX0488_019.nt.4 | 79964.1 | 7.4 | 7.4 | 14.3 | 14.3 | 0.0 | 0.0 |
| DEX0488_019.nt.5 | 79959 | 11.1 | 11.1 | 21.4 | 21.4 | 0.0 | 0.0 |
| DEX0488_019.nt.5 | 79959.1 | 11.1 | 11.5 | 21.4 | 21.4 | 0.0 | 0.0 |
| DEX0488_019.nt.5 | 79960 | 11.1 | 11.1 | 21.4 | 21.4 | 0.0 | 0.0 |
| DEX0488_019.nt.5 | 79960.1 | 14.8 | 14.8 | 21.4 | 21.4 | 7.7 | 7.7 |
| DEX0488_019.nt.6 | 79955 | 3.7 | 3.7 | 0.0 | 0.0 | 7.7 | 7.7 |
| DEX0488_019.nt.6 | 79955.1 | 3.7 | 3.7 | 7.1 | 7.1 | 0.0 | 0.0 |
| DEX0488_019.nt.6 | 79956 | 7.4 | 7.4 | 14.3 | 14.3 | 0.0 | 0.0 |
| DEX0488_019.nt.6 | 79956.1 | 7.4 | 7.4 | 14.3 | 14.3 | 0.0 | 0.0 |
| DEX0488_019.nt.6 | 79959 | 11.1 | 11.1 | 21.4 | 21.4 | 0.0 | 0.0 |
| DEX0488_019.nt.6 | 79959.1 | 11.1 | 11.5 | 21.4 | 21.4 | 0.0 | 0.0 |
| DEX0488_019.nt.6 | 79960 | 11.1 | 11.1 | 21.4 | 21.4 | 0.0 | 0.0 |
| DEX0488_019.nt.6 | 79960.1 | 14.8 | 14.8 | 21.4 | 21.4 | 7.7 | 7.7 |
| DEX0488_019.nt.6 | 79963 | 7.4 | 7.7 | 14.3 | 15.4 | 0.0 | 0.0 |
| DEX0488_019.nt.6 | 79963.1 | 7.4 | 7.4 | 14.3 | 14.3 | 0.0 | 0.0 |
| DEX0488_019.nt.6 | 79964 | 7.4 | 7.7 | 14.3 | 15.4 | 0.0 | 0.0 |
| DEX0488_019.nt.6 | 79964.1 | 7.4 | 7.4 | 14.3 | 14.3 | 0.0 | 0.0 |
| DEX0488_019.nt.7 | 79955 | 3.7 | 3.7 | 0.0 | 0.0 | 7.7 | 7.7 |
| DEX0488_019.nt.7 | 79955.1 | 3.7 | 3.7 | 7.1 | 7.1 | 0.0 | 0.0 |
| DEX0488_019.nt.7 | 79956 | 7.4 | 7.4 | 14.3 | 14.3 | 0.0 | 0.0 |
| DEX0488_019.nt.7 | 79956.1 | 7.4 | 7.4 | 14.3 | 14.3 | 0.0 | 0.0 |
| DEX0488_019.nt.7 | 79959 | 11.1 | 11.1 | 21.4 | 21.4 | 0.0 | 0.0 |
| DEX0488_019.nt.7 | 79959.1 | 11.1 | 11.5 | 21.4 | 21.4 | 0.0 | 0.0 |
| DEX0488_019.nt.7 | 79960 | 11.1 | 11.1 | 21.4 | 21.4 | 0.0 | 0.0 |
| DEX0488_019.nt.7 | 79960.1 | 14.8 | 14.8 | 21.4 | 21.4 | 7.7 | 7.7 |
| DEX0488_019.nt.7 | 79963 | 7.4 | 7.7 | 14.3 | 15.4 | 0.0 | 0.0 |
| DEX0488_019.nt.7 | 79963.1 | 7.4 | 7.4 | 14.3 | 14.3 | 0.0 | 0.0 |
| DEX0488_019.nt.7 | 79964 | 7.4 | 7.7 | 14.3 | 15.4 | 0.0 | 0.0 |
| DEX0488_019.nt.7 | 79964.1 | 7.4 | 7.4 | 14.3 | 14.3 | 0.0 | 0.0 |
| DEX0488_019.nt.8 | 79955 | 3.7 | 3.7 | 0.0 | 0.0 | 7.7 | 7.7 |
| DEX0488_019.nt.8 | 79955.1 | 3.7 | 3.7 | 7.1 | 7.1 | 0.0 | 0.0 |
| DEX0488_019.nt.8 | 79956 | 7.4 | 7.4 | 14.3 | 14.3 | 0.0 | 0.0 |
| DEX0488_019.nt.8 | 79956.1 | 7.4 | 7.4 | 14.3 | 14.3 | 0.0 | 0.0 |
| DEX0488_019.nt.8 | 79959 | 11.1 | 11.1 | 21.4 | 21.4 | 0.0 | 0.0 |
| DEX0488_019.nt.8 | 79959.1 | 11.1 | 11.5 | 21.4 | 21.4 | 0.0 | 0.0 |
| DEX0488_019.nt.8 | 79960 | 11.1 | 11.1 | 21.4 | 21.4 | 0.0 | 0.0 |
| DEX0488_019.nt.8 | 79960.1 | 14.8 | 14.8 | 21.4 | 21.4 | 7.7 | 7.7 |
| DEX0488_019.nt.8 | 79963 | 7.4 | 7.7 | 14.3 | 15.4 | 0.0 | 0.0 |
| DEX0488_019.nt.8 | 79963.1 | 7.4 | 7.4 | 14.3 | 14.3 | 0.0 | 0.0 |
| DEX0488_019.nt.8 | 79964 | 7.4 | 7.7 | 14.3 | 15.4 | 0.0 | 0.0 |
| DEX0488_019.nt.8 | 79964.1 | 7.4 | 7.4 | 14.3 | 14.3 | 0.0 | 0.0 |
| DEX0488_020.nt.1 | 77771 | 0.0 | 0.0 | 0.0 | 0.0 | 0.0 | 0.0 |
| DEX0488_020.nt.1 | 77771.1 | 0.0 | 0.0 | 0.0 | 0.0 | 0.0 | 0.0 |
| DEX0488_020.nt.1 | 77772 | 0.0 | 0.0 | 0.0 | 0.0 | 0.0 | 0.0 |
| DEX0488_020.nt.1 | 77772.1 | 0.0 | 0.0 | 0.0 | 0.0 | 0.0 | 0.0 |
| DEX0488_021.nt.1 | 21187 | 3.7 | 3.7 | 7.1 | 7.1 | 0.0 | 0.0 |
| DEX0488_021.nt.1 | 21187.1 | 3.7 | 3.7 | 7.1 | 7.1 | 0.0 | 0.0 |
| DEX0488_021.nt.1 | 78927 | 7.4 | 7.4 | 14.3 | 14.3 | 0.0 | 0.0 |
| DEX0488_021.nt.1 | 78927.1 | 7.4 | 7.4 | 14.3 | 14.3 | 0.0 | 0.0 |
| DEX0488_021.nt.1 | 78928 | 0.0 | 0.0 | 0.0 | 0.0 | 0.0 | 0.0 |
| DEX0488_021.nt.1 | 78928.1 | 0.0 | 0.0 | 0.0 | 0.0 | 0.0 | 0.0 |
| DEX0488_021.nt.2 | 21187 | 3.7 | 3.7 | 7.1 | 7.1 | 0.0 | 0.0 |
| DEX0488_021.nt.2 | 21187.1 | 3.7 | 3.7 | 7.1 | 7.1 | 0.0 | 0.0 |
| DEX0488_021.nt.2 | 78927 | 7.4 | 7.4 | 14.3 | 14.3 | 0.0 | 0.0 |
| DEX0488_021.nt.2 | 78927.1 | 7.4 | 7.4 | 14.3 | 14.3 | 0.0 | 0.0 |
| DEX0488_021.nt.2 | 78928 | 0.0 | 0.0 | 0.0 | 0.0 | 0.0 | 0.0 |
| DEX0488_021.nt.2 | 78928.1 | 0.0 | 0.0 | 0.0 | 0.0 | 0.0 | 0.0 |
| DEX0488_022.nt.1 | 79699 | 0.0 | 0.0 | 0.0 | 0.0 | 0.0 | 0.0 |
| DEX0488_022.nt.1 | 79699.1 | 0.0 | 0.0 | 0.0 | 0.0 | 0.0 | 0.0 |
| DEX0488_022.nt.1 | 79700 | 0.0 | 0.0 | 0.0 | 0.0 | 0.0 | 0.0 |
| DEX0488_022.nt.1 | 79700.1 | 0.0 | 0.0 | 0.0 | 0.0 | 0.0 | 0.0 |
| DEX0488_022.nt.2 | 79699 | 0.0 | 0.0 | 0.0 | 0.0 | 0.0 | 0.0 |
| DEX0488_022.nt.2 | 79699.1 | 0.0 | 0.0 | 0.0 | 0.0 | 0.0 | 0.0 |
| DEX0488_022.nt.2 | 79700 | 0.0 | 0.0 | 0.0 | 0.0 | 0.0 | 0.0 |
| DEX0488_022.nt.2 | 79700.1 | 0.0 | 0.0 | 0.0 | 0.0 | 0.0 | 0.0 |
| DEX0488_022.nt.3 | 79699 | 0.0 | 0.0 | 0.0 | 0.0 | 0.0 | 0.0 |
| DEX0488_022.nt.3 | 79699.1 | 0.0 | 0.0 | 0.0 | 0.0 | 0.0 | 0.0 |
| DEX0488_022.nt.3 | 79700 | 0.0 | 0.0 | 0.0 | 0.0 | 0.0 | 0.0 |
| DEX0488_022.nt.3 | 79700.1 | 0.0 | 0.0 | 0.0 | 0.0 | 0.0 | 0.0 |
| DEX0488_022.nt.4 | 79699 | 0.0 | 0.0 | 0.0 | 0.0 | 0.0 | 0.0 |
| DEX0488_022.nt.4 | 79699.1 | 0.0 | 0.0 | 0.0 | 0.0 | 0.0 | 0.0 |
| DEX0488_022.nt.4 | 79700 | 0.0 | 0.0 | 0.0 | 0.0 | 0.0 | 0.0 |
| DEX0488_022.nt.4 | 79700.1 | 0.0 | 0.0 | 0.0 | 0.0 | 0.0 | 0.0 |
| DEX0488_022.nt.5 | 79699 | 0.0 | 0.0 | 0.0 | 0.0 | 0.0 | 0.0 |
| DEX0488_022.nt.5 | 79699.1 | 0.0 | 0.0 | 0.0 | 0.0 | 0.0 | 0.0 |
| DEX0488_022.nt.5 | 79700 | 0.0 | 0.0 | 0.0 | 0.0 | 0.0 | 0.0 |
| DEX0488_022.nt.5 | 79700.1 | 0.0 | 0.0 | 0.0 | 0.0 | 0.0 | 0.0 |
| DEX0488_022.nt.6 | 79699 | 0.0 | 0.0 | 0.0 | 0.0 | 0.0 | 0.0 |
| DEX0488_022.nt.6 | 79699.1 | 0.0 | 0.0 | 0.0 | 0.0 | 0.0 | 0.0 |
| DEX0488_022.nt.6 | 79700 | 0.0 | 0.0 | 0.0 | 0.0 | 0.0 | 0.0 |
| DEX0488_022.nt.6 | 79700.1 | 0.0 | 0.0 | 0.0 | 0.0 | 0.0 | 0.0 |
| DEX0488_022.nt.7 | 79699 | 0.0 | 0.0 | 0.0 | 0.0 | 0.0 | 0.0 |
| DEX0488_022.nt.7 | 79699.1 | 0.0 | 0.0 | 0.0 | 0.0 | 0.0 | 0.0 |
| DEX0488_022.nt.7 | 79700 | 0.0 | 0.0 | 0.0 | 0.0 | 0.0 | 0.0 |
| DEX0488_022.nt.7 | 79700.1 | 0.0 | 0.0 | 0.0 | 0.0 | 0.0 | 0.0 |
| DEX0488_022.nt.8 | 79699 | 0.0 | 0.0 | 0.0 | 0.0 | 0.0 | 0.0 |
| DEX0488_022.nt.8 | 79699.1 | 0.0 | 0.0 | 0.0 | 0.0 | 0.0 | 0.0 |
| DEX0488_022.nt.8 | 79700 | 0.0 | 0.0 | 0.0 | 0.0 | 0.0 | 0.0 |
| DEX0488_022.nt.8 | 79700.1 | 0.0 | 0.0 | 0.0 | 0.0 | 0.0 | 0.0 |
| DEX0488_023.nt.1 | 78715 | 48.1 | 48.1 | 57.1 | 57.1 | 38.5 | 38.5 |
| DEX0488_023.nt.1 | 78715.1 | 51.9 | 56.0 | 57.1 | 66.7 | 46.2 | 46.2 |
| DEX0488_023.nt.1 | 78716 | 48.1 | 48.1 | 64.3 | 64.3 | 30.8 | 30.8 |
| DEX0488_023.nt.1 | 78716.1 | 55.6 | 55.6 | 64.3 | 64.3 | 46.2 | 46.2 |
| DEX0488_023.nt.2 | 78715 | 48.1 | 48.1 | 57.1 | 57.1 | 38.5 | 38.5 |
| DEX0488_023.nt.2 | 78715.1 | 51.9 | 56.0 | 57.1 | 66.7 | 46.2 | 46.2 |
| DEX0488_023.nt.2 | 78716 | 48.1 | 48.1 | 64.3 | 64.3 | 30.8 | 30.8 |
| DEX0488_023.nt.2 | 78716.1 | 55.6 | 55.6 | 64.3 | 64.3 | 46.2 | 46.2 |
| DEX0488_024.nt.1 | 79699 | 0.0 | 0.0 | 0.0 | 0.0 | 0.0 | 0.0 |
| DEX0488_024.nt.1 | 79699.1 | 0.0 | 0.0 | 0.0 | 0.0 | 0.0 | 0.0 |
| DEX0488_024.nt.1 | 79700 | 0.0 | 0.0 | 0.0 | 0.0 | 0.0 | 0.0 |
| DEX0488_024.nt.1 | 79700.1 | 0.0 | 0.0 | 0.0 | 0.0 | 0.0 | 0.0 |
| DEX0488_024.nt.2 | 79699 | 0.0 | 0.0 | 0.0 | 0.0 | 0.0 | 0.0 |
| DEX0488_024.nt.2 | 79699.1 | 0.0 | 0.0 | 0.0 | 0.0 | 0.0 | 0.0 |
| DEX0488_024.nt.2 | 79700 | 0.0 | 0.0 | 0.0 | 0.0 | 0.0 | 0.0 |
| DEX0488_024.nt.2 | 79700.1 | 0.0 | 0.0 | 0.0 | 0.0 | 0.0 | 0.0 |
| DEX0488_025.nt.1 | 90527 | 3.7 | 6.7 | 7.1 | 11.1 | 0.0 | 0.0 |
| DEX0488_025.nt.1 | 90527.1 | 3.7 | 12.5 | 7.1 | 16.7 | 0.0 | 0.0 |
| DEX0488_025.nt.1 | 90528 | 3.7 | 3.7 | 7.1 | 7.1 | 0.0 | 0.0 |
| DEX0488_025.nt.1 | 90528.1 | 3.7 | 3.7 | 7.1 | 7.1 | 0.0 | 0.0 |
| DEX0488_025.nt.1 | 90543 | 3.7 | 8.3 | 7.1 | 12.5 | 0.0 | 0.0 |
| DEX0488_025.nt.1 | 90543.1 | 3.7 | 8.3 | 7.1 | 12.5 | 0.0 | 0.0 |
| DEX0488_025.nt.1 | 90544 | 3.7 | 4.0 | 7.1 | 8.3 | 0.0 | 0.0 |
| DEX0488_025.nt.1 | 90544.1 | 3.7 | 3.7 | 7.1 | 7.1 | 0.0 | 0.0 |
| DEX0488_025.nt.1 | 91047 | 0.0 | 0.0 | 0.0 | 0.0 | 0.0 | 0.0 |
| DEX0488_025.nt.1 | 91047.1 | 0.0 | 0.0 | 0.0 | 0.0 | 0.0 | 0.0 |
| DEX0488_025.nt.1 | 91048 | 0.0 | 0.0 | 0.0 | 0.0 | 0.0 | 0.0 |
| DEX0488_025.nt.1 | 91048.1 | 0.0 | 0.0 | 0.0 | 0.0 | 0.0 | 0.0 |
| DEX0488_025.nt.1 | 91051 | 0.0 | 0.0 | 0.0 | 0.0 | 0.0 | 0.0 |
| DEX0488_025.nt.1 | 91051.1 | 0.0 | 0.0 | 0.0 | 0.0 | 0.0 | 0.0 |
| DEX0488_025.nt.1 | 91052 | 0.0 | 0.0 | 0.0 | 0.0 | 0.0 | 0.0 |
| DEX0488_025.nt.1 | 91052.1 | 0.0 | 0.0 | 0.0 | 0.0 | 0.0 | 0.0 |
| DEX0488_025.nt.1 | 91055 | 0.0 | 0.0 | 0.0 | 0.0 | 0.0 | 0.0 |
| DEX0488_025.nt.1 | 91055.1 | 0.0 | 0.0 | 0.0 | 0.0 | 0.0 | 0.0 |
| DEX0488_025.nt.1 | 91056 | 0.0 | 0.0 | 0.0 | 0.0 | 0.0 | 0.0 |
| DEX0488_025.nt.1 | 91056.1 | 0.0 | 0.0 | 0.0 | 0.0 | 0.0 | 0.0 |
| DEX0488_025.nt.1 | 91171 | 3.7 | 7.7 | 7.1 | 10.0 | 0.0 | 0.0 |
| DEX0488_025.nt.1 | 91171.1 | 0.0 | 0.0 | 0.0 | 0.0 | 0.0 | 0.0 |
| DEX0488_025.nt.1 | 91172 | 3.7 | 3.7 | 7.1 | 7.1 | 0.0 | 0.0 |
| DEX0488_025.nt.1 | 91172.1 | 3.7 | 4.5 | 7.1 | 10.0 | 0.0 | 0.0 |
| DEX0488_025.nt.1 | 91271 | 3.7 | 14.3 | 7.1 | 25.0 | 0.0 | 0.0 |
| DEX0488_025.nt.1 | 91271.1 | 3.7 | 10.0 | 7.1 | 16.7 | 0.0 | 0.0 |
| DEX0488_025.nt.1 | 91272 | 3.7 | 3.7 | 7.1 | 7.1 | 0.0 | 0.0 |
| DEX0488_025.nt.1 | 91272.1 | 3.7 | 3.7 | 7.1 | 7.1 | 0.0 | 0.0 |
| DEX0488_025.nt.1 | 91275 | 3.7 | 8.3 | 7.1 | 12.5 | 0.0 | 0.0 |
| DEX0488_025.nt.1 | 91275.1 | 3.7 | 10.0 | 7.1 | 14.3 | 0.0 | 0.0 |
| DEX0488_025.nt.1 | 91276 | 3.7 | 3.8 | 7.1 | 7.1 | 0.0 | 0.0 |
| DEX0488_025.nt.1 | 91276.1 | 3.7 | 3.7 | 7.1 | 7.1 | 0.0 | 0.0 |
| DEX0488_025.nt.2 | 90528 | 3.7 | 3.7 | 7.1 | 7.1 | 0.0 | 0.0 |
| DEX0488_025.nt.2 | 90528.1 | 3.7 | 3.7 | 7.1 | 7.1 | 0.0 | 0.0 |
| DEX0488_025.nt.2 | 90544 | 3.7 | 4.0 | 7.1 | 8.3 | 0.0 | 0.0 |
| DEX0488_025.nt.2 | 90544.1 | 3.7 | 3.7 | 7.1 | 7.1 | 0.0 | 0.0 |
| DEX0488_025.nt.2 | 91172 | 3.7 | 3.7 | 7.1 | 7.1 | 0.0 | 0.0 |
| DEX0488_025.nt.2 | 91172.1 | 3.7 | 4.5 | 7.1 | 10.0 | 0.0 | 0.0 |
| DEX0488_025.nt.2 | 91272 | 3.7 | 3.7 | 7.1 | 7.1 | 0.0 | 0.0 |
| DEX0488_025.nt.2 | 91272.1 | 3.7 | 3.7 | 7.1 | 7.1 | 0.0 | 0.0 |
| DEX0488_025.nt.2 | 91276 | 3.7 | 3.8 | 7.1 | 7.1 | 0.0 | 0.0 |
| DEX0488_025.nt.2 | 91276.1 | 3.7 | 3.7 | 7.1 | 7.1 | 0.0 | 0.0 |
| DEX0488_026.nt.1 | 24160 | 0.0 | 0.0 | 0.0 | 0.0 | 0.0 | 0.0 |
| DEX0488_026.nt.1 | 24160.1 | 0.0 | 0.0 | 0.0 | 0.0 | 0.0 | 0.0 |
| DEX0488_026.nt.1 | 24160.2 | 0.0 | 0.0 | 0.0 | 0.0 | 0.0 | 0.0 |
| DEX0488_026.nt.1 | 24160.3 | 0.0 | 0.0 | 0.0 | 0.0 | 0.0 | 0.0 |
| DEX0488_026.nt.1 | 26816 | 0.0 | 0.0 | 0.0 | 0.0 | 0.0 | 0.0 |
| DEX0488_026.nt.1 | 26816.1 | 0.0 | 0.0 | 0.0 | 0.0 | 0.0 | 0.0 |
| DEX0488_027.nt.1 | 17852 | 81.5 | 81.5 | 85.7 | 85.7 | 76.9 | 76.9 |
| DEX0488_027.nt.1 | 17852.1 | 81.5 | 81.5 | 85.7 | 85.7 | 76.9 | 76.9 |
| DEX0488_027.nt.1 | 17853 | 85.2 | 85.2 | 92.9 | 92.9 | 76.9 | 76.9 |
| DEX0488_027.nt.1 | 17853.1 | 85.2 | 85.2 | 92.9 | 92.9 | 76.9 | 76.9 |
| DEX0488_027.nt.1 | 18644 | 77.8 | 77.8 | 85.7 | 85.7 | 69.2 | 69.2 |
| DEX0488_027.nt.1 | 18644.1 | 81.5 | 81.5 | 92.9 | 92.9 | 69.2 | 69.2 |
| DEX0488_027.nt.1 | 18644.2 | 70.4 | 76.0 | 71.4 | 83.3 | 69.2 | 69.2 |
| DEX0488_027.nt.1 | 18644.3 | 81.5 | 81.5 | 85.7 | 85.7 | 76.9 | 76.9 |
| DEX0488_027.nt.1 | 18645 | 85.2 | 85.2 | 92.9 | 92.9 | 76.9 | 76.9 |
| DEX0488_027.nt.1 | 18645.1 | 85.2 | 85.2 | 92.9 | 92.9 | 76.9 | 76.9 |
| DEX0488_027.nt.1 | 18645.2 | 85.2 | 85.2 | 92.9 | 92.9 | 76.9 | 76.9 |
| DEX0488_027.nt.1 | 18645.3 | 85.2 | 85.2 | 92.9 | 92.9 | 76.9 | 76.9 |
| DEX0488_027.nt.1 | 41955 | 77.8 | 77.8 | 85.7 | 85.7 | 69.2 | 69.2 |
| DEX0488_027.nt.1 | 41955.1 | 81.5 | 81.5 | 85.7 | 85.7 | 76.9 | 76.9 |
| DEX0488_027.nt.1 | 41955.2 | 81.5 | 81.5 | 85.7 | 85.7 | 76.9 | 76.9 |
| DEX0488_027.nt.1 | 41955.3 | 77.8 | 77.8 | 85.7 | 85.7 | 69.2 | 69.2 |
| DEX0488_027.nt.1 | 41955.4 | 81.5 | 81.5 | 85.7 | 85.7 | 76.9 | 76.9 |
| DEX0488_027.nt.1 | 41956 | 74.1 | 74.1 | 85.7 | 85.7 | 61.5 | 61.5 |
| DEX0488_027.nt.1 | 41956.1 | 51.9 | 82.4 | 64.3 | 90.0 | 38.5 | 71.4 |
| DEX0488_027.nt.1 | 41956.2 | 77.8 | 77.8 | 85.7 | 85.7 | 69.2 | 69.2 |
| DEX0488_027.nt.1 | 41956.3 | 81.5 | 81.5 | 85.7 | 85.7 | 76.9 | 76.9 |
| DEX0488_027.nt.1 | 41956.4 | 81.5 | 81.5 | 85.7 | 85.7 | 76.9 | 76.9 |
| DEX0488_027.nt.2 | 17852 | 81.5 | 81.5 | 85.7 | 85.7 | 76.9 | 76.9 |
| DEX0488_027.nt.2 | 17852.1 | 81.5 | 81.5 | 85.7 | 85.7 | 76.9 | 76.9 |
| DEX0488_027.nt.2 | 17853 | 85.2 | 85.2 | 92.9 | 92.9 | 76.9 | 76.9 |
| DEX0488_027.nt.2 | 17853.1 | 85.2 | 85.2 | 92.9 | 92.9 | 76.9 | 76.9 |
| DEX0488_027.nt.2 | 18644 | 77.8 | 77.8 | 85.7 | 85.7 | 69.2 | 69.2 |
| DEX0488_027.nt.2 | 18644.1 | 81.5 | 81.5 | 92.9 | 92.9 | 69.2 | 69.2 |
| DEX0488_027.nt.2 | 18644.2 | 70.4 | 76.0 | 71.4 | 83.3 | 69.2 | 69.2 |
| DEX0488_027.nt.2 | 18644.3 | 81.5 | 81.5 | 85.7 | 85.7 | 76.9 | 76.9 |
| DEX0488_027.nt.2 | 18645 | 85.2 | 85.2 | 92.9 | 92.9 | 76.9 | 76.9 |
| DEX0488_027.nt.2 | 18645.1 | 85.2 | 85.2 | 92.9 | 92.9 | 76.9 | 76.9 |
| DEX0488_027.nt.2 | 18645.2 | 85.2 | 85.2 | 92.9 | 92.9 | 76.9 | 76.9 |
| DEX0488_027.nt.2 | 18645.3 | 85.2 | 85.2 | 92.9 | 92.9 | 76.9 | 76.9 |
| DEX0488_027.nt.3 | 17852 | 81.5 | 81.5 | 85.7 | 85.7 | 76.9 | 76.9 |
| DEX0488_027.nt.3 | 17852.1 | 81.5 | 81.5 | 85.7 | 85.7 | 76.9 | 76.9 |
| DEX0488_027.nt.3 | 17853 | 85.2 | 85.2 | 92.9 | 92.9 | 76.9 | 76.9 |
| DEX0488_027.nt.3 | 17853.1 | 85.2 | 85.2 | 92.9 | 92.9 | 76.9 | 76.9 |
| DEX0488_027.nt.3 | 18644 | 77.8 | 77.8 | 85.7 | 85.7 | 69.2 | 69.2 |
| DEX0488_027.nt.3 | 18644.1 | 81.5 | 81.5 | 92.9 | 92.9 | 69.2 | 69.2 |
| DEX0488_027.nt.3 | 18644.2 | 70.4 | 76.0 | 71.4 | 83.3 | 69.2 | 69.2 |
| DEX0488_027.nt.3 | 18644.3 | 81.5 | 81.5 | 85.7 | 85.7 | 76.9 | 76.9 |
| DEX0488_027.nt.3 | 18645 | 85.2 | 85.2 | 92.9 | 92.9 | 76.9 | 76.9 |
| DEX0488_027.nt.3 | 18645.1 | 85.2 | 85.2 | 92.9 | 92.9 | 76.9 | 76.9 |
| DEX0488_027.nt.3 | 18645.2 | 85.2 | 85.2 | 92.9 | 92.9 | 76.9 | 76.9 |
| DEX0488_027.nt.3 | 18645.3 | 85.2 | 85.2 | 92.9 | 92.9 | 76.9 | 76.9 |
| DEX0488_027.nt.4 | 17852 | 81.5 | 81.5 | 85.7 | 85.7 | 76.9 | 76.9 |
| DEX0488_027.nt.4 | 17852.1 | 81.5 | 81.5 | 85.7 | 85.7 | 76.9 | 76.9 |
| DEX0488_027.nt.4 | 17853 | 85.2 | 85.2 | 92.9 | 92.9 | 76.9 | 76.9 |
| DEX0488_027.nt.4 | 17853.1 | 85.2 | 85.2 | 92.9 | 92.9 | 76.9 | 76.9 |
| DEX0488_027.nt.4 | 18644 | 77.8 | 77.8 | 85.7 | 85.7 | 69.2 | 69.2 |
| DEX0488_027.nt.4 | 18644.1 | 81.5 | 81.5 | 92.9 | 92.9 | 69.2 | 69.2 |
| DEX0488_027.nt.4 | 18644.2 | 70.4 | 76.0 | 71.4 | 83.3 | 69.2 | 69.2 |
| DEX0488_027.nt.4 | 18644.3 | 81.5 | 81.5 | 85.7 | 85.7 | 76.9 | 76.9 |
| DEX0488_027.nt.4 | 18645 | 85.2 | 85.2 | 92.9 | 92.9 | 76.9 | 76.9 |
| DEX0488_027.nt.4 | 18645.1 | 85.2 | 85.2 | 92.9 | 92.9 | 76.9 | 76.9 |
| DEX0488_027.nt.4 | 18645.2 | 85.2 | 85.2 | 92.9 | 92.9 | 76.9 | 76.9 |
| DEX0488_027.nt.4 | 18645.3 | 85.2 | 85.2 | 92.9 | 92.9 | 76.9 | 76.9 |
| DEX0488_028.nt.1 | 33088 | 7.4 | 8.0 | 7.1 | 8.3 | 7.7 | 7.7 |
| DEX0488_028.nt.1 | 33088.1 | 3.7 | 4.0 | 0.0 | 0.0 | 7.7 | 7.7 |
| DEX0488_028.nt.1 | 33088.2 | 3.7 | 4.0 | 0.0 | 0.0 | 7.7 | 7.7 |
| DEX0488_028.nt.1 | 33088.3 | 3.7 | 4.2 | 0.0 | 0.0 | 7.7 | 8.3 |
| DEX0488_029.nt.1 | 79635 | 25.9 | 25.9 | 35.7 | 35.7 | 15.4 | 15.4 |
| DEX0488_029.nt.1 | 79635.1 | 25.9 | 25.9 | 28.6 | 28.6 | 23.1 | 23.1 |
| DEX0488_030.nt.1 | 35317 | 0.0 | 0.0 | 0.0 | 0.0 | 0.0 | 0.0 |
| DEX0488_030.nt.1 | 35317.1 | 0.0 | 0.0 | 0.0 | 0.0 | 0.0 | 0.0 |
| DEX0488_031.nt.1 | 78587 | 29.6 | 29.6 | 28.6 | 28.6 | 30.8 | 30.8 |
| DEX0488_031.nt.1 | 78587.1 | 33.3 | 33.3 | 28.6 | 28.6 | 38.5 | 38.5 |
| DEX0488_031.nt.1 | 78588 | 33.3 | 34.6 | 28.6 | 30.8 | 38.5 | 38.5 |
| DEX0488_031.nt.1 | 78588.1 | 29.6 | 30.8 | 21.4 | 23.1 | 38.5 | 38.5 |
| DEX0488_032.nt.1 | 78711 | 22.2 | 22.2 | 7.1 | 7.1 | 38.5 | 38.5 |
| DEX0488_032.nt.1 | 78711.1 | 22.2 | 22.2 | 7.1 | 7.1 | 38.5 | 38.5 |
| DEX0488_032.nt.1 | 78712 | 18.5 | 18.5 | 7.1 | 7.1 | 30.8 | 30.8 |
| DEX0488_032.nt.1 | 78712.1 | 22.2 | 22.2 | 7.1 | 7.1 | 38.5 | 38.5 |
| DEX0488_033.nt.1 | 79019 | 14.8 | 14.8 | 28.6 | 28.6 | 0.0 | 0.0 |
| DEX0488_033.nt.1 | 79019.1 | 14.8 | 14.8 | 28.6 | 28.6 | 0.0 | 0.0 |
| DEX0488_033.nt.1 | 79020 | 11.1 | 12.0 | 21.4 | 25.0 | 0.0 | 0.0 |
| DEX0488_033.nt.1 | 79020.1 | 14.8 | 14.8 | 28.6 | 28.6 | 0.0 | 0.0 |
| DEX0488_033.nt.2 | 79019 | 14.8 | 14.8 | 28.6 | 28.6 | 0.0 | 0.0 |
| DEX0488_033.nt.2 | 79019.1 | 14.8 | 14.8 | 28.6 | 28.6 | 0.0 | 0.0 |
| DEX0488_033.nt.2 | 79020 | 11.1 | 12.0 | 21.4 | 25.0 | 0.0 | 0.0 |
| DEX0488_033.nt.2 | 79020.1 | 14.8 | 14.8 | 28.6 | 28.6 | 0.0 | 0.0 |
| DEX0488_034.nt.1 | 90123 | 25.9 | 70.0 | 21.4 | 75.0 | 30.8 | 66.7 |
| DEX0488_034.nt.1 | 90123.1 | 29.6 | 44.4 | 21.4 | 33.3 | 38.5 | 55.6 |
| DEX0488_034.nt.1 | 90124 | 33.3 | 50.0 | 35.7 | 50.0 | 30.8 | 50.0 |
| DEX0488_034.nt.1 | 90124.1 | 33.3 | 47.4 | 28.6 | 40.0 | 38.5 | 55.6 |
| DEX0488_035.nt.1 | 79903 | 25.9 | 25.9 | 42.9 | 42.9 | 7.7 | 7.7 |
| DEX0488_035.nt.1 | 79903.1 | 29.6 | 29.6 | 42.9 | 42.9 | 15.4 | 15.4 |
| DEX0488_035.nt.1 | 79904 | 33.3 | 34.6 | 42.9 | 42.9 | 23.1 | 25.0 |
| DEX0488_035.nt.1 | 79904.1 | 33.3 | 34.6 | 50.0 | 53.8 | 15.4 | 15.4 |
| DEX0488_035.nt.2 | 79903 | 25.9 | 25.9 | 42.9 | 42.9 | 7.7 | 7.7 |
| DEX0488_035.nt.2 | 79903.1 | 29.6 | 29.6 | 42.9 | 42.9 | 15.4 | 15.4 |
| DEX0488_035.nt.2 | 79904 | 33.3 | 34.6 | 42.9 | 42.9 | 23.1 | 25.0 |
| DEX0488_035.nt.2 | 79904.1 | 33.3 | 34.6 | 50.0 | 53.8 | 15.4 | 15.4 |
| DEX0488_036.nt.1 | 3976 | 11.1 | 37.5 | 14.3 | 40.0 | 7.7 | 33.3 |
| DEX0488_036.nt.1 | 3976.1 | 18.5 | 20.0 | 14.3 | 14.3 | 23.1 | 27.3 |
| DEX0488_036.nt.1 | 3977 | 14.8 | 15.4 | 7.1 | 7.1 | 23.1 | 25.0 |
| DEX0488_036.nt.1 | 3977.1 | 14.8 | 17.4 | 7.1 | 7.7 | 23.1 | 30.0 |
| DEX0488_036.nt.2 | 3976 | 11.1 | 37.5 | 14.3 | 40.0 | 7.7 | 33.3 |
| DEX0488_036.nt.2 | 3976.1 | 18.5 | 20.0 | 14.3 | 14.3 | 23.1 | 27.3 |
| DEX0488_036.nt.2 | 3977 | 14.8 | 15.4 | 7.1 | 7.1 | 23.1 | 25.0 |
| DEX0488_036.nt.2 | 3977.1 | 14.8 | 17.4 | 7.1 | 7.7 | 23.1 | 30.0 |

[0500] TABLE 10

| | | Cln | Cln | Cln | Cln | Cln | Cln |
|---|---|---|---|---|---|---|---|
| | | Multi- | Multi- | Multi- | Multi- | Multi- | Multi- |
| | | cancer | cancer | cancer | cancer | cancer | cancer |
| | | 550 ALL | 550 ALL | 550 ASC | 550 ASC | 550 RS | 550 RS |
| | Oligo | % up | % valid | % up | % valid | % up | % valid |
| DEX ID | Name | n = 27 | up n = 27 | n = 14 | up n = 14 | n = 13 | up n = 13 |
| DEX0488_001.nt.1 | 79931 | 40.7 | 44.0 | 35.7 | 41.7 | 46.2 | 46.2 |
| DEX0488_001.nt.1 | 79931.1 | 44.4 | 44.4 | 42.9 | 42.9 | 46.2 | 46.2 |
| DEX0488_001.nt.1 | 79932 | 55.6 | 55.6 | 50.0 | 50.0 | 61.5 | 61.5 |
| DEX0488_001.nt.1 | 79932.1 | 59.3 | 59.3 | 50.0 | 50.0 | 69.2 | 69.2 |
| DEX0488_001.nt.10 | 79931 | 40.7 | 44.0 | 35.7 | 41.7 | 46.2 | 46.2 |
| DEX0488_001.nt.10 | 79931.1 | 44.4 | 44.4 | 42.9 | 42.9 | 46.2 | 46.2 |
| DEX0488_001.nt.10 | 79932 | 55.6 | 55.6 | 50.0 | 50.0 | 61.5 | 61.5 |
| DEX0488_001.nt.10 | 79932.1 | 59.3 | 59.3 | 50.0 | 50.0 | 69.2 | 69.2 |
| DEX0488_001.nt.11 | 79931 | 40.7 | 44.0 | 35.7 | 41.7 | 46.2 | 46.2 |
| DEX0488_001.nt.11 | 79931.1 | 44.4 | 44.4 | 42.9 | 42.9 | 46.2 | 46.2 |
| DEX0488_001.nt.11 | 79932 | 55.6 | 55.6 | 50.0 | 50.0 | 61.5 | 61.5 |
| DEX0488_001.nt.11 | 79932.1 | 59.3 | 59.3 | 50.0 | 50.0 | 69.2 | 69.2 |
| DEX0488_001.nt.2 | 79931 | 40.7 | 44.0 | 35.7 | 41.7 | 46.2 | 46.2 |
| DEX0488_001.nt.2 | 79931.1 | 44.4 | 44.4 | 42.9 | 42.9 | 46.2 | 46.2 |
| DEX0488_001.nt.2 | 79932 | 55.6 | 55.6 | 50.0 | 50.0 | 61.5 | 61.5 |
| DEX0488_001.nt.2 | 79932.1 | 59.3 | 59.3 | 50.0 | 50.0 | 69.2 | 69.2 |
| DEX0488_001.nt.3 | 79931 | 40.7 | 44.0 | 35.7 | 41.7 | 46.2 | 46.2 |
| DEX0488_001.nt.3 | 79931.1 | 44.4 | 44.4 | 42.9 | 42.9 | 46.2 | 46.2 |
| DEX0488_001.nt.3 | 79932 | 55.6 | 55.6 | 50.0 | 50.0 | 61.5 | 61.5 |
| DEX0488_001.nt.3 | 79932.1 | 59.3 | 59.3 | 50.0 | 50.0 | 69.2 | 69.2 |
| DEX0488_001.nt.4 | 79931 | 40.7 | 44.0 | 35.7 | 41.7 | 46.2 | 46.2 |
| DEX0488_001.nt.4 | 79931.1 | 44.4 | 44.4 | 42.9 | 42.9 | 46.2 | 46.2 |
| DEX0488_001.nt.4 | 79932 | 55.6 | 55.6 | 50.0 | 50.0 | 61.5 | 61.5 |
| DEX0488_001.nt.4 | 79932.1 | 59.3 | 59.3 | 50.0 | 50.0 | 69.2 | 69.2 |
| DEX0488_001.nt.5 | 79931 | 40.7 | 44.0 | 35.7 | 41.7 | 46.2 | 46.2 |
| DEX0488_001.nt.5 | 79931.1 | 44.4 | 44.4 | 42.9 | 42.9 | 46.2 | 46.2 |
| DEX0488_001.nt.5 | 79932 | 55.6 | 55.6 | 50.0 | 50.0 | 61.5 | 61.5 |
| DEX0488_001.nt.5 | 79932.1 | 59.3 | 59.3 | 50.0 | 50.0 | 69.2 | 69.2 |
| DEX0488_001.nt.6 | 79931 | 40.7 | 44.0 | 35.7 | 41.7 | 46.2 | 46.2 |
| DEX0488_001.nt.6 | 79931.1 | 44.4 | 44.4 | 42.9 | 42.9 | 46.2 | 46.2 |
| DEX0488_001.nt.6 | 79932 | 55.6 | 55.6 | 50.0 | 50.0 | 61.5 | 61.5 |
| DEX0488_001.nt.6 | 79932.1 | 59.3 | 59.3 | 50.0 | 50.0 | 69.2 | 69.2 |
| DEX0488_001.nt.7 | 79931 | 40.7 | 44.0 | 35.7 | 41.7 | 46.2 | 46.2 |
| DEX0488_001.nt.7 | 79931.1 | 44.4 | 44.4 | 42.9 | 42.9 | 46.2 | 46.2 |
| DEX0488_001.nt.7 | 79932 | 55.6 | 55.6 | 50.0 | 50.0 | 61.5 | 61.5 |
| DEX0488_001.nt.7 | 79932.1 | 59.3 | 59.3 | 50.0 | 50.0 | 69.2 | 69.2 |
| DEX0488_001.nt.8 | 79931 | 40.7 | 44.0 | 35.7 | 41.7 | 46.2 | 46.2 |
| DEX0488_001.nt.8 | 79931.1 | 44.4 | 44.4 | 42.9 | 42.9 | 46.2 | 46.2 |
| DEX0488_001.nt.8 | 79932 | 55.6 | 55.6 | 50.0 | 50.0 | 61.5 | 61.5 |
| DEX0488_001.nt.8 | 79932.1 | 59.3 | 59.3 | 50.0 | 50.0 | 69.2 | 69.2 |
| DEX0488_001.nt.9 | 79931 | 40.7 | 44.0 | 35.7 | 41.7 | 46.2 | 46.2 |
| DEX0488_001.nt.9 | 79931.1 | 44.4 | 44.4 | 42.9 | 42.9 | 46.2 | 46.2 |
| DEX0488_001.nt.9 | 79932 | 55.6 | 55.6 | 50.0 | 50.0 | 61.5 | 61.5 |
| DEX0488_001.nt.9 | 79932.1 | 59.3 | 59.3 | 50.0 | 50.0 | 69.2 | 69.2 |
| DEX0488_002.nt.1 | 91111 | 11.1 | 14.3 | 21.4 | 27.3 | 0.0 | 0.0 |
| DEX0488_002.nt.1 | 91111.1 | 14.8 | 20.0 | 21.4 | 27.3 | 7.7 | 11.1 |
| DEX0488_002.nt.1 | 91112 | 3.7 | 5.3 | 7.1 | 10.0 | 0.0 | 0.0 |
| DEX0488_002.nt.1 | 91112.1 | 11.1 | 15.8 | 21.4 | 33.3 | 0.0 | 0.0 |
| DEX0488_003.nt.1 | 27921 | 25.9 | 25.9 | 28.6 | 28.6 | 23.1 | 23.1 |
| DEX0488_003.nt.1 | 27921.1 | 22.2 | 23.1 | 21.4 | 23.1 | 23.1 | 23.1 |
| DEX0488_003.nt.1 | 27922 | 18.5 | 18.5 | 21.4 | 21.4 | 15.4 | 15.4 |
| DEX0488_003.nt.1 | 27922.1 | 25.9 | 25.9 | 28.6 | 28.6 | 23.1 | 23.1 |
| DEX0488_003.nt.1 | 78855 | 63.0 | 63.0 | 50.0 | 50.0 | 76.9 | 76.9 |
| DEX0488_003.nt.1 | 78855.1 | 63.0 | 63.0 | 50.0 | 50.0 | 76.9 | 76.9 |
| DEX0488_003.nt.1 | 78856 | 63.0 | 65.4 | 50.0 | 53.8 | 76.9 | 76.9 |
| DEX0488_003.nt.1 | 78856.1 | 63.0 | 63.0 | 57.1 | 57.1 | 69.2 | 69.2 |
| DEX0488_003.nt.2 | 27921 | 25.9 | 25.9 | 28.6 | 28.6 | 23.1 | 23.1 |
| DEX0488_003.nt.2 | 27921.1 | 22.2 | 23.1 | 21.4 | 23.1 | 23.1 | 23.1 |
| DEX0488_003.nt.2 | 27922 | 18.5 | 18.5 | 21.4 | 21.4 | 15.4 | 15.4 |
| DEX0488_003.nt.2 | 27922.1 | 25.9 | 25.9 | 28.6 | 28.6 | 23.1 | 23.1 |
| DEX0488_003.nt.2 | 78855 | 63.0 | 63.0 | 50.0 | 50.0 | 76.9 | 76.9 |
| DEX0488_003.nt.2 | 78855.1 | 63.0 | 63.0 | 50.0 | 50.0 | 76.9 | 76.9 |
| DEX0488_003.nt.2 | 78856 | 63.0 | 65.4 | 50.0 | 53.8 | 76.9 | 76.9 |
| DEX0488_003.nt.2 | 78856.1 | 63.0 | 63.0 | 57.1 | 57.1 | 69.2 | 69.2 |
| DEX0488_003.nt.3 | 27921 | 25.9 | 25.9 | 28.6 | 28.6 | 23.1 | 23.1 |
| DEX0488_003.nt.3 | 27921.1 | 22.2 | 23.1 | 21.4 | 23.1 | 23.1 | 23.1 |
| DEX0488_003.nt.3 | 27922 | 18.5 | 18.5 | 21.4 | 21.4 | 15.4 | 15.4 |
| DEX0488_003.nt.3 | 27922.1 | 25.9 | 25.9 | 28.6 | 28.6 | 23.1 | 23.1 |
| DEX0488_003.nt.3 | 78855 | 63.0 | 63.0 | 50.0 | 50.0 | 76.9 | 76.9 |
| DEX0488_003.nt.3 | 78855.1 | 63.0 | 63.0 | 50.0 | 50.0 | 76.9 | 76.9 |
| DEX0488_003.nt.3 | 78856 | 63.0 | 65.4 | 50.0 | 53.8 | 76.9 | 76.9 |
| DEX0488_003.nt.3 | 78856.1 | 63.0 | 63.0 | 57.1 | 57.1 | 69.2 | 69.2 |
| DEX0488_003.nt.4 | 27921 | 25.9 | 25.9 | 28.6 | 28.6 | 23.1 | 23.1 |
| DEX0488_003.nt.4 | 27921.1 | 22.2 | 23.1 | 21.4 | 23.1 | 23.1 | 23.1 |
| DEX0488_003.nt.4 | 27922 | 18.5 | 18.5 | 21.4 | 21.4 | 15.4 | 15.4 |
| DEX0488_003.nt.4 | 27922.1 | 25.9 | 25.9 | 28.6 | 28.6 | 23.1 | 23.1 |
| DEX0488_003.nt.4 | 78855 | 63.0 | 63.0 | 50.0 | 50.0 | 76.9 | 76.9 |
| DEX0488_003.nt.4 | 78855.1 | 63.0 | 63.0 | 50.0 | 50.0 | 76.9 | 76.9 |
| DEX0488_003.nt.4 | 78856 | 63.0 | 65.4 | 50.0 | 53.8 | 76.9 | 76.9 |
| DEX0488_003.nt.4 | 78856.1 | 63.0 | 63.0 | 57.1 | 57.1 | 69.2 | 69.2 |
| DEX0488_003.nt.5 | 27921 | 25.9 | 25.9 | 28.6 | 28.6 | 23.1 | 23.1 |
| DEX0488_003.nt.5 | 27921.1 | 22.2 | 23.1 | 21.4 | 23.1 | 23.1 | 23.1 |
| DEX0488_003.nt.5 | 27922 | 18.5 | 18.5 | 21.4 | 21.4 | 15.4 | 15.4 |
| DEX0488_003.nt.5 | 27922.1 | 25.9 | 25.9 | 28.6 | 28.6 | 23.1 | 23.1 |
| DEX0488_003.nt.5 | 78855 | 63.0 | 63.0 | 50.0 | 50.0 | 76.9 | 76.9 |
| DEX0488_003.nt.5 | 78855.1 | 63.0 | 63.0 | 50.0 | 50.0 | 76.9 | 76.9 |
| DEX0488_003.nt.5 | 78856 | 63.0 | 65.4 | 50.0 | 53.8 | 76.9 | 76.9 |
| DEX0488_003.nt.5 | 78856.1 | 63.0 | 63.0 | 57.1 | 57.1 | 69.2 | 69.2 |
| DEX0488_003.nt.6 | 27921 | 25.9 | 25.9 | 28.6 | 28.6 | 23.1 | 23.1 |
| DEX0488_003.nt.6 | 27921.1 | 22.2 | 23.1 | 21.4 | 23.1 | 23.1 | 23.1 |
| DEX0488_003.nt.6 | 27922 | 18.5 | 18.5 | 21.4 | 21.4 | 15.4 | 15.4 |
| DEX0488_003.nt.6 | 27922.1 | 25.9 | 25.9 | 28.6 | 28.6 | 23.1 | 23.1 |
| DEX0488_003.nt.6 | 78855 | 63.0 | 63.0 | 50.0 | 50.0 | 76.9 | 76.9 |
| DEX0488_003.nt.6 | 78855.1 | 63.0 | 63.0 | 50.0 | 50.0 | 76.9 | 76.9 |
| DEX0488_003.nt.6 | 78856 | 63.0 | 65.4 | 50.0 | 53.8 | 76.9 | 76.9 |
| DEX0488_003.nt.6 | 78856.1 | 63.0 | 63.0 | 57.1 | 57.1 | 69.2 | 69.2 |
| DEX0488_003.nt.7 | 78855 | 63.0 | 63.0 | 50.0 | 50.0 | 76.9 | 76.9 |
| DEX0488_003.nt.7 | 78855.1 | 63.0 | 63.0 | 50.0 | 50.0 | 76.9 | 76.9 |
| DEX0488_003.nt.7 | 78856 | 63.0 | 65.4 | 50.0 | 53.8 | 76.9 | 76.9 |
| DEX0488_003.nt.7 | 78856.1 | 63.0 | 63.0 | 57.1 | 57.1 | 69.2 | 69.2 |
| DEX0488_004.nt.1 | 10666 | 37.0 | 41.7 | 42.9 | 50.0 | 30.8 | 33.3 |
| DEX0488_004.nt.1 | 10666.1 | 37.0 | 40.0 | 50.0 | 50.0 | 23.1 | 27.3 |
| DEX0488_004.nt.1 | 10667 | 44.4 | 44.4 | 57.1 | 57.1 | 30.8 | 30.8 |
| DEX0488_004.nt.1 | 10667.1 | 51.9 | 51.9 | 64.3 | 64.3 | 38.5 | 38.5 |
| DEX0488_005.nt.1 | 9744 | 11.1 | 11.5 | 7.1 | 7.7 | 15.4 | 15.4 |
| DEX0488_005.nt.1 | 9744.1 | 11.1 | 11.5 | 7.1 | 7.7 | 15.4 | 15.4 |
| DEX0488_005.nt.1 | 9745 | 22.2 | 23.1 | 14.3 | 15.4 | 30.8 | 30.8 |
| DEX0488_005.nt.1 | 9745.1 | 18.5 | 19.2 | 14.3 | 15.4 | 23.1 | 23.1 |
| DEX0488_006.nt.1 | 4353 | 55.6 | 60.0 | 64.3 | 75.0 | 46.2 | 46.2 |
| DEX0488_006.nt.1 | 4353.1 | 55.6 | 60.0 | 64.3 | 75.0 | 46.2 | 46.2 |
| DEX0488_006.nt.1 | 5804 | 55.6 | 60.0 | 64.3 | 75.0 | 46.2 | 46.2 |
| DEX0488_006.nt.1 | 5804.1 | 55.6 | 60.0 | 64.3 | 75.0 | 46.2 | 46.2 |
| DEX0488_006.nt.1 | 5804.2 | 55.6 | 60.0 | 64.3 | 75.0 | 46.2 | 46.2 |
| DEX0488_006.nt.1 | 92287 | 51.9 | 56.0 | 64.3 | 75.0 | 38.5 | 38.5 |
| DEX0488_006.nt.1 | 92287.1 | 51.9 | 56.0 | 64.3 | 75.0 | 38.5 | 38.5 |
| DEX0488_007.nt.1 | 41955 | 74.1 | 74.1 | 85.7 | 85.7 | 61.5 | 61.5 |
| DEX0488_007.nt.1 | 41955.1 | 77.8 | 77.8 | 85.7 | 85.7 | 69.2 | 69.2 |
| DEX0488_007.nt.1 | 41955.2 | 77.8 | 77.8 | 85.7 | 85.7 | 69.2 | 69.2 |
| DEX0488_007.nt.1 | 41955.3 | 77.8 | 77.8 | 85.7 | 85.7 | 69.2 | 69.2 |
| DEX0488_007.nt.1 | 41955.4 | 74.1 | 76.9 | 85.7 | 85.7 | 61.5 | 66.7 |
| DEX0488_007.nt.1 | 41956 | 66.7 | 66.7 | 78.6 | 78.6 | 53.8 | 53.8 |
| DEX0488_007.nt.1 | 41956.1 | 48.1 | 76.5 | 64.3 | 90.0 | 30.8 | 57.1 |
| DEX0488_007.nt.1 | 41956.2 | 70.4 | 70.4 | 85.7 | 85.7 | 53.8 | 53.8 |
| DEX0488_007.nt.1 | 41956.3 | 74.1 | 74.1 | 85.7 | 85.7 | 61.5 | 61.5 |
| DEX0488_007.nt.1 | 41956.4 | 77.8 | 77.8 | 85.7 | 85.7 | 69.2 | 69.2 |
| DEX0488_008.nt.1 | 17292 | 7.4 | 8.0 | 14.3 | 16.7 | 0.0 | 0.0 |
| DEX0488_008.nt.1 | 17292.1 | 7.4 | 8.0 | 14.3 | 16.7 | 0.0 | 0.0 |
| DEX0488_008.nt.1 | 17293 | 11.1 | 12.0 | 14.3 | 16.7 | 7.7 | 7.7 |
| DEX0488_008.nt.1 | 17293.1 | 3.7 | 4.2 | 7.1 | 9.1 | 0.0 | 0.0 |
| DEX0488_008.nt.1 | 2085 | 7.4 | 8.3 | 14.3 | 18.2 | 0.0 | 0.0 |
| DEX0488_008.nt.1 | 24404 | 14.8 | 15.4 | 21.4 | 23.1 | 7.7 | 7.7 |
| DEX0488_008.nt.1 | 24404.1 | 14.8 | 16.0 | 21.4 | 25.0 | 7.7 | 7.7 |
| DEX0488_008.nt.1 | 24405 | 11.1 | 12.5 | 14.3 | 18.2 | 7.7 | 7.7 |
| DEX0488_008.nt.1 | 24405.1 | 3.7 | 4.2 | 7.1 | 9.1 | 0.0 | 0.0 |
| DEX0488_008.nt.1 | 4909 | 11.1 | 12.0 | 14.3 | 16.7 | 7.7 | 7.7 |
| DEX0488_008.nt.1 | 4909.1 | 11.1 | 12.0 | 14.3 | 16.7 | 7.7 | 7.7 |
| DEX0488_008.nt.1 | 4910 | 11.1 | 12.0 | 14.3 | 16.7 | 7.7 | 7.7 |
| DEX0488_008.nt.1 | 4910.1 | 7.4 | 8.3 | 14.3 | 18.2 | 0.0 | 0.0 |
| DEX0488_008.nt.2 | 17292 | 7.4 | 8.0 | 14.3 | 16.7 | 0.0 | 0.0 |
| DEX0488_008.nt.2 | 17292.1 | 7.4 | 8.0 | 14.3 | 16.7 | 0.0 | 0.0 |
| DEX0488_008.nt.2 | 17293 | 11.1 | 12.0 | 14.3 | 16.7 | 7.7 | 7.7 |
| DEX0488_008.nt.2 | 17293.1 | 3.7 | 4.2 | 7.1 | 9.1 | 0.0 | 0.0 |
| DEX0488_008.nt.2 | 2085 | 7.4 | 8.3 | 14.3 | 18.2 | 0.0 | 0.0 |
| DEX0488_008.nt.2 | 24404 | 14.8 | 15.4 | 21.4 | 23.1 | 7.7 | 7.7 |
| DEX0488_008.nt.2 | 24404.1 | 14.8 | 16.0 | 21.4 | 25.0 | 7.7 | 7.7 |
| DEX0488_008.nt.2 | 24405 | 11.1 | 12.5 | 14.3 | 18.2 | 7.7 | 7.7 |
| DEX0488_008.nt.2 | 24405.1 | 3.7 | 4.2 | 7.1 | 9.1 | 0.0 | 0.0 |
| DEX0488_008.nt.2 | 4909 | 11.1 | 12.0 | 14.3 | 16.7 | 7.7 | 7.7 |
| DEX0488_008.nt.2 | 4909.1 | 11.1 | 12.0 | 14.3 | 16.7 | 7.7 | 7.7 |
| DEX0488_008.nt.2 | 4910 | 11.1 | 12.0 | 14.3 | 16.7 | 7.7 | 7.7 |
| DEX0488_008.nt.2 | 4910.1 | 7.4 | 8.3 | 14.3 | 18.2 | 0.0 | 0.0 |
| DEX0488_009.nt.1 | 79339 | 11.1 | 13.0 | 21.4 | 21.4 | 0.0 | 0.0 |
| DEX0488_009.nt.1 | 79339.1 | 11.1 | 13.6 | 21.4 | 23.1 | 0.0 | 0.0 |
| DEX0488_010.nt.1 | 26770 | 11.1 | 11.1 | 14.3 | 14.3 | 7.7 | 7.7 |
| DEX0488_010.nt.1 | 26770.1 | 11.1 | 11.1 | 14.3 | 14.3 | 7.7 | 7.7 |
| DEX0488_011.nt.1 | 33840 | 74.1 | 76.9 | 57.1 | 61.5 | 92.3 | 92.3 |
| DEX0488_011.nt.1 | 33840.1 | 74.1 | 76.9 | 71.4 | 71.4 | 76.9 | 83.3 |
| DEX0488_011.nt.1 | 33841 | 70.4 | 70.4 | 71.4 | 71.4 | 69.2 | 69.2 |
| DEX0488_011.nt.1 | 33841.1 | 70.4 | 70.4 | 71.4 | 71.4 | 69.2 | 69.2 |
| DEX0488_011.nt.1 | 39927 | 74.1 | 74.1 | 64.3 | 64.3 | 84.6 | 84.6 |
| DEX0488_011.nt.1 | 39927.1 | 81.5 | 81.5 | 71.4 | 71.4 | 92.3 | 92.3 |
| DEX0488_011.nt.1 | 39927.2 | 77.8 | 77.8 | 64.3 | 64.3 | 92.3 | 92.3 |
| DEX0488_011.nt.1 | 39927.3 | 70.4 | 70.4 | 64.3 | 64.3 | 76.9 | 76.9 |
| DEX0488_011.nt.1 | 39927.4 | 77.8 | 77.8 | 71.4 | 71.4 | 84.6 | 84.6 |
| DEX0488_011.nt.1 | 39928 | 70.4 | 70.4 | 71.4 | 71.4 | 69.2 | 69.2 |
| DEX0488_011.nt.1 | 39928.1 | 74.1 | 74.1 | 71.4 | 71.4 | 76.9 | 76.9 |
| DEX0488_011.nt.1 | 39928.2 | 70.4 | 70.4 | 64.3 | 64.3 | 76.9 | 76.9 |
| DEX0488_011.nt.1 | 39928.3 | 70.4 | 70.4 | 64.3 | 64.3 | 76.9 | 76.9 |
| DEX0488_011.nt.1 | 39928.4 | 66.7 | 66.7 | 64.3 | 64.3 | 69.2 | 69.2 |
| DEX0488_012.nt.1 | 21187 | 3.7 | 3.7 | 7.1 | 7.1 | 0.0 | 0.0 |
| DEX0488_012.nt.1 | 21187.1 | 3.7 | 3.7 | 7.1 | 7.1 | 0.0 | 0.0 |
| DEX0488_012.nt.1 | 21188 | 3.7 | 3.7 | 7.1 | 7.1 | 0.0 | 0.0 |
| DEX0488_012.nt.1 | 21188.1 | 3.7 | 3.7 | 7.1 | 7.1 | 0.0 | 0.0 |
| DEX0488_012.nt.1 | 78927 | 3.7 | 3.7 | 7.1 | 7.1 | 0.0 | 0.0 |
| DEX0488_012.nt.1 | 78927.1 | 7.4 | 7.4 | 14.3 | 14.3 | 0.0 | 0.0 |
| DEX0488_013.nt.1 | 79955 | 0.0 | 0.0 | 0.0 | 0.0 | 0.0 | 0.0 |
| DEX0488_013.nt.1 | 79955.1 | 3.7 | 3.7 | 7.1 | 7.1 | 0.0 | 0.0 |
| DEX0488_013.nt.1 | 79956 | 7.4 | 7.4 | 14.3 | 14.3 | 0.0 | 0.0 |
| DEX0488_013.nt.1 | 79956.1 | 3.7 | 3.7 | 7.1 | 7.1 | 0.0 | 0.0 |
| DEX0488_013.nt.1 | 79959 | 11.1 | 11.1 | 21.4 | 21.4 | 0.0 | 0.0 |
| DEX0488_013.nt.1 | 79959.1 | 11.1 | 11.1 | 21.4 | 21.4 | 0.0 | 0.0 |
| DEX0488_013.nt.1 | 79960 | 11.1 | 11.1 | 21.4 | 21.4 | 0.0 | 0.0 |
| DEX0488_013.nt.1 | 79960.1 | 18.5 | 18.5 | 28.6 | 28.6 | 7.7 | 7.7 |
| DEX0488_013.nt.1 | 79963 | 7.4 | 7.7 | 14.3 | 15.4 | 0.0 | 0.0 |
| DEX0488_013.nt.1 | 79963.1 | 3.7 | 3.8 | 7.1 | 7.7 | 0.0 | 0.0 |
| DEX0488_013.nt.1 | 79964 | 3.7 | 4.0 | 7.1 | 7.7 | 0.0 | 0.0 |
| DEX0488_013.nt.1 | 79964.1 | 7.4 | 7.4 | 14.3 | 14.3 | 0.0 | 0.0 |
| DEX0488_013.nt.2 | 79959 | 11.1 | 11.1 | 21.4 | 21.4 | 0.0 | 0.0 |
| DEX0488_013.nt.2 | 79959.1 | 11.1 | 11.1 | 21.4 | 21.4 | 0.0 | 0.0 |
| DEX0488_013.nt.2 | 79960 | 11.1 | 11.1 | 21.4 | 21.4 | 0.0 | 0.0 |
| DEX0488_013.nt.2 | 79960.1 | 18.5 | 18.5 | 28.6 | 28.6 | 7.7 | 7.7 |
| DEX0488_014.nt.1 | 90171 | 7.4 | 7.7 | 14.3 | 15.4 | 0.0 | 0.0 |
| DEX0488_014.nt.1 | 90171.1 | 7.4 | 7.4 | 14.3 | 14.3 | 0.0 | 0.0 |
| DEX0488_014.nt.1 | 90172 | 3.7 | 5.3 | 7.1 | 11.1 | 0.0 | 0.0 |
| DEX0488_014.nt.1 | 90172.1 | 7.4 | 7.4 | 14.3 | 14.3 | 0.0 | 0.0 |
| DEX0488_014.nt.2 | 90171 | 7.4 | 7.7 | 14.3 | 15.4 | 0.0 | 0.0 |
| DEX0488_014.nt.2 | 90171.1 | 7.4 | 7.4 | 14.3 | 14.3 | 0.0 | 0.0 |
| DEX0488_014.nt.2 | 90172 | 3.7 | 5.3 | 7.1 | 11.1 | 0.0 | 0.0 |
| DEX0488_014.nt.2 | 90172.1 | 7.4 | 7.4 | 14.3 | 14.3 | 0.0 | 0.0 |
| DEX0488_014.nt.3 | 90171 | 7.4 | 7.7 | 14.3 | 15.4 | 0.0 | 0.0 |
| DEX0488_014.nt.3 | 90171.1 | 7.4 | 7.4 | 14.3 | 14.3 | 0.0 | 0.0 |
| DEX0488_014.nt.3 | 90172 | 3.7 | 5.3 | 7.1 | 11.1 | 0.0 | 0.0 |
| DEX0488_014.nt.3 | 90172.1 | 7.4 | 7.4 | 14.3 | 14.3 | 0.0 | 0.0 |
| DEX0488_014.nt.4 | 90171 | 7.4 | 7.7 | 14.3 | 15.4 | 0.0 | 0.0 |
| DEX0488_014.nt.4 | 90171.1 | 7.4 | 7.4 | 14.3 | 14.3 | 0.0 | 0.0 |
| DEX0488_014.nt.4 | 90172 | 3.7 | 5.3 | 7.1 | 11.1 | 0.0 | 0.0 |
| DEX0488_014.nt.4 | 90172.1 | 7.4 | 7.4 | 14.3 | 14.3 | 0.0 | 0.0 |
| DEX0488_015.nt.1 | 78631 | 18.5 | 20.0 | 14.3 | 16.7 | 23.1 | 23.1 |
| DEX0488_015.nt.1 | 78631.1 | 18.5 | 20.0 | 14.3 | 16.7 | 23.1 | 23.1 |
| DEX0488_015.nt.1 | 78632 | 3.7 | 3.7 | 0.0 | 0.0 | 7.7 | 7.7 |
| DEX0488_015.nt.1 | 78632.1 | 7.4 | 7.4 | 0.0 | 0.0 | 15.4 | 15.4 |
| DEX0488_015.nt.2 | 78631 | 18.5 | 20.0 | 14.3 | 16.7 | 23.1 | 23.1 |
| DEX0488_015.nt.2 | 78631.1 | 18.5 | 20.0 | 14.3 | 16.7 | 23.1 | 23.1 |
| DEX0488_015.nt.2 | 78632 | 3.7 | 3.7 | 0.0 | 0.0 | 7.7 | 7.7 |
| DEX0488_015.nt.2 | 78632.1 | 7.4 | 7.4 | 0.0 | 0.0 | 15.4 | 15.4 |
| DEX0488_016.nt.1 | 79660 | 7.4 | 15.4 | 7.1 | 12.5 | 7.7 | 20.0 |
| DEX0488_016.nt.1 | 79660.1 | 7.4 | 11.1 | 7.1 | 9.1 | 7.7 | 14.3 |
| DEX0488_016.nt.10 | 79659 | 0.0 | 0.0 | 0.0 | 0.0 | 0.0 | 0.0 |
| DEX0488_016.nt.10 | 79659.1 | 0.0 | 0.0 | 0.0 | 0.0 | 0.0 | 0.0 |
| DEX0488_016.nt.10 | 79660 | 7.4 | 15.4 | 7.1 | 12.5 | 7.7 | 20.0 |
| DEX0488_016.nt.10 | 79660.1 | 7.4 | 11.1 | 7.1 | 9.1 | 7.7 | 14.3 |
| DEX0488_016.nt.11 | 79659 | 0.0 | 0.0 | 0.0 | 0.0 | 0.0 | 0.0 |
| DEX0488_016.nt.11 | 79659.1 | 0.0 | 0.0 | 0.0 | 0.0 | 0.0 | 0.0 |
| DEX0488_016.nt.11 | 79660 | 7.4 | 15.4 | 7.1 | 12.5 | 7.7 | 20.0 |
| DEX0488_016.nt.11 | 79660.1 | 7.4 | 11.1 | 7.1 | 9.1 | 7.7 | 14.3 |
| DEX0488_016.nt.2 | 79660 | 7.4 | 15.4 | 7.1 | 12.5 | 7.7 | 20.0 |
| DEX0488_016.nt.2 | 79660.1 | 7.4 | 11.1 | 7.1 | 9.1 | 7.7 | 14.3 |
| DEX0488_016.nt.3 | 79660 | 7.4 | 15.4 | 7.1 | 12.5 | 7.7 | 20.0 |
| DEX0488_016.nt.3 | 79660.1 | 7.4 | 11.1 | 7.1 | 9.1 | 7.7 | 14.3 |
| DEX0488_016.nt.4 | 79660 | 7.4 | 15.4 | 7.1 | 12.5 | 7.7 | 20.0 |
| DEX0488_016.nt.4 | 79660.1 | 7.4 | 11.1 | 7.1 | 9.1 | 7.7 | 14.3 |
| DEX0488_016.nt.5 | 79660 | 7.4 | 15.4 | 7.1 | 12.5 | 7.7 | 20.0 |
| DEX0488_016.nt.5 | 79660.1 | 7.4 | 11.1 | 7.1 | 9.1 | 7.7 | 14.3 |
| DEX0488_016.nt.6 | 79660 | 7.4 | 15.4 | 7.1 | 12.5 | 7.7 | 20.0 |
| DEX0488_016.nt.6 | 79660.1 | 7.4 | 11.1 | 7.1 | 9.1 | 7.7 | 14.3 |
| DEX0488_016.nt.7 | 79660 | 7.4 | 15.4 | 7.1 | 12.5 | 7.7 | 20.0 |
| DEX0488_016.nt.7 | 79660.1 | 7.4 | 11.1 | 7.1 | 9.1 | 7.7 | 14.3 |
| DEX0488_016.nt.8 | 79660 | 7.4 | 15.4 | 7.1 | 12.5 | 7.7 | 20.0 |
| DEX0488_016.nt.8 | 79660.1 | 7.4 | 11.1 | 7.1 | 9.1 | 7.7 | 14.3 |
| DEX0488_016.nt.9 | 79660 | 7.4 | 15.4 | 7.1 | 12.5 | 7.7 | 20.0 |
| DEX0488_016.nt.9 | 79660.1 | 7.4 | 11.1 | 7.1 | 9.1 | 7.7 | 14.3 |
| DEX0488_017.nt.1 | 4353 | 55.6 | 60.0 | 64.3 | 75.0 | 46.2 | 46.2 |
| DEX0488_017.nt.1 | 4353.1 | 55.6 | 60.0 | 64.3 | 75.0 | 46.2 | 46.2 |
| DEX0488_017.nt.1 | 5804 | 55.6 | 60.0 | 64.3 | 75.0 | 46.2 | 46.2 |
| DEX0488_017.nt.1 | 5804.1 | 55.6 | 60.0 | 64.3 | 75.0 | 46.2 | 46.2 |
| DEX0488_017.nt.1 | 5804.2 | 55.6 | 60.0 | 64.3 | 75.0 | 46.2 | 46.2 |
| DEX0488_017.nt.1 | 92287 | 51.9 | 56.0 | 64.3 | 75.0 | 38.5 | 38.5 |
| DEX0488_017.nt.1 | 92287.1 | 51.9 | 56.0 | 64.3 | 75.0 | 38.5 | 38.5 |
| DEX0488_018.nt.1 | 79936 | 37.0 | 37.0 | 35.7 | 35.7 | 38.5 | 38.5 |
| DEX0488_018.nt.1 | 79936.1 | 33.3 | 33.3 | 35.7 | 35.7 | 30.8 | 30.8 |
| DEX0488_018.nt.1 | 79944 | 33.3 | 36.0 | 35.7 | 38.5 | 30.8 | 33.3 |
| DEX0488_018.nt.1 | 79944.1 | 37.0 | 41.7 | 35.7 | 38.5 | 38.5 | 45.5 |
| DEX0488_018.nt.2 | 79936 | 37.0 | 37.0 | 35.7 | 35.7 | 38.5 | 38.5 |
| DEX0488_018.nt.2 | 79936.1 | 33.3 | 33.3 | 35.7 | 35.7 | 30.8 | 30.8 |
| DEX0488_018.nt.2 | 79944 | 33.3 | 36.0 | 35.7 | 38.5 | 30.8 | 33.3 |
| DEX0488_018.nt.2 | 79944.1 | 37.0 | 41.7 | 35.7 | 38.5 | 38.5 | 45.5 |
| DEX0488_018.nt.3 | 79936 | 37.0 | 37.0 | 35.7 | 35.7 | 38.5 | 38.5 |
| DEX0488_018.nt.3 | 79936.1 | 33.3 | 33.3 | 35.7 | 35.7 | 30.8 | 30.8 |
| DEX0488_018.nt.3 | 79944 | 33.3 | 36.0 | 35.7 | 38.5 | 30.8 | 33.3 |
| DEX0488_018.nt.3 | 79944.1 | 37.0 | 41.7 | 35.7 | 38.5 | 38.5 | 45.5 |
| DEX0488_018.nt.4 | 79936 | 37.0 | 37.0 | 35.7 | 35.7 | 38.5 | 38.5 |
| DEX0488_018.nt.4 | 79936.1 | 33.3 | 33.3 | 35.7 | 35.7 | 30.8 | 30.8 |
| DEX0488_018.nt.4 | 79944 | 33.3 | 36.0 | 35.7 | 38.5 | 30.8 | 33.3 |
| DEX0488_018.nt.4 | 79944.1 | 37.0 | 41.7 | 35.7 | 38.5 | 38.5 | 45.5 |
| DEX0488_018.nt.5 | 79936 | 37.0 | 37.0 | 35.7 | 35.7 | 38.5 | 38.5 |
| DEX0488_018.nt.5 | 79936.1 | 33.3 | 33.3 | 35.7 | 35.7 | 30.8 | 30.8 |
| DEX0488_018.nt.5 | 79944 | 33.3 | 36.0 | 35.7 | 38.5 | 30.8 | 33.3 |
| DEX0488_018.nt.5 | 79944.1 | 37.0 | 41.7 | 35.7 | 38.5 | 38.5 | 45.5 |
| DEX0488_018.nt.6 | 79936 | 37.0 | 37.0 | 35.7 | 35.7 | 38.5 | 38.5 |
| DEX0488_018.nt.6 | 79936.1 | 33.3 | 33.3 | 35.7 | 35.7 | 30.8 | 30.8 |
| DEX0488_018.nt.6 | 79944 | 33.3 | 36.0 | 35.7 | 38.5 | 30.8 | 33.3 |
| DEX0488_018.nt.6 | 79944.1 | 37.0 | 41.7 | 35.7 | 38.5 | 38.5 | 45.5 |
| DEX0488_018.nt.7 | 79936 | 37.0 | 37.0 | 35.7 | 35.7 | 38.5 | 38.5 |
| DEX0488_018.nt.7 | 79936.1 | 33.3 | 33.3 | 35.7 | 35.7 | 30.8 | 30.8 |
| DEX0488_018.nt.7 | 79944 | 33.3 | 36.0 | 35.7 | 38.5 | 30.8 | 33.3 |
| DEX0488_018.nt.7 | 79944.1 | 37.0 | 41.7 | 35.7 | 38.5 | 38.5 | 45.5 |
| DEX0488_018.nt.8 | 79936 | 37.0 | 37.0 | 35.7 | 35.7 | 38.5 | 38.5 |
| DEX0488_018.nt.8 | 79936.1 | 33.3 | 33.3 | 35.7 | 35.7 | 30.8 | 30.8 |
| DEX0488_018.nt.8 | 79944 | 33.3 | 36.0 | 35.7 | 38.5 | 30.8 | 33.3 |
| DEX0488_018.nt.8 | 79944.1 | 37.0 | 41.7 | 35.7 | 38.5 | 38.5 | 45.5 |
| DEX0488_019.nt.1 | 79955 | 0.0 | 0.0 | 0.0 | 0.0 | 0.0 | 0.0 |
| DEX0488_019.nt.1 | 79955.1 | 3.7 | 3.7 | 7.1 | 7.1 | 0.0 | 0.0 |
| DEX0488_019.nt.1 | 79956 | 7.4 | 7.4 | 14.3 | 14.3 | 0.0 | 0.0 |
| DEX0488_019.nt.1 | 79956.1 | 3.7 | 3.7 | 7.1 | 7.1 | 0.0 | 0.0 |
| DEX0488_019.nt.1 | 79959 | 11.1 | 11.1 | 21.4 | 21.4 | 0.0 | 0.0 |
| DEX0488_019.nt.1 | 79959.1 | 11.1 | 11.1 | 21.4 | 21.4 | 0.0 | 0.0 |
| DEX0488_019.nt.1 | 79960 | 11.1 | 11.1 | 21.4 | 21.4 | 0.0 | 0.0 |
| DEX0488_019.nt.1 | 79960.1 | 18.5 | 18.5 | 28.6 | 28.6 | 7.7 | 7.7 |
| DEX0488_019.nt.1 | 79963 | 7.4 | 7.7 | 14.3 | 15.4 | 0.0 | 0.0 |
| DEX0488_019.nt.1 | 79963.1 | 3.7 | 3.8 | 7.1 | 7.7 | 0.0 | 0.0 |
| DEX0488_019.nt.1 | 79964 | 3.7 | 4.0 | 7.1 | 7.7 | 0.0 | 0.0 |
| DEX0488_019.nt.1 | 79964.1 | 7.4 | 7.4 | 14.3 | 14.3 | 0.0 | 0.0 |
| DEX0488_019.nt.2 | 79955 | 0.0 | 0.0 | 0.0 | 0.0 | 0.0 | 0.0 |
| DEX0488_019.nt.2 | 79955.1 | 3.7 | 3.7 | 7.1 | 7.1 | 0.0 | 0.0 |
| DEX0488_019.nt.2 | 79956 | 7.4 | 7.4 | 14.3 | 14.3 | 0.0 | 0.0 |
| DEX0488_019.nt.2 | 79956.1 | 3.7 | 3.7 | 7.1 | 7.1 | 0.0 | 0.0 |
| DEX0488_019.nt.2 | 79959 | 11.1 | 11.1 | 21.4 | 21.4 | 0.0 | 0.0 |
| DEX0488_019.nt.2 | 79959.1 | 11.1 | 11.1 | 21.4 | 21.4 | 0.0 | 0.0 |
| DEX0488_019.nt.2 | 79960 | 11.1 | 11.1 | 21.4 | 21.4 | 0.0 | 0.0 |
| DEX0488_019.nt.2 | 79960.1 | 18.5 | 18.5 | 28.6 | 28.6 | 7.7 | 7.7 |
| DEX0488_019.nt.2 | 79963 | 7.4 | 7.7 | 14.3 | 15.4 | 0.0 | 0.0 |
| DEX0488_019.nt.2 | 79963.1 | 3.7 | 3.8 | 7.1 | 7.7 | 0.0 | 0.0 |
| DEX0488_019.nt.2 | 79964 | 3.7 | 4.0 | 7.1 | 7.7 | 0.0 | 0.0 |
| DEX0488_019.nt.2 | 79964.1 | 7.4 | 7.4 | 14.3 | 14.3 | 0.0 | 0.0 |
| DEX0488_019.nt.3 | 79955 | 0.0 | 0.0 | 0.0 | 0.0 | 0.0 | 0.0 |
| DEX0488_019.nt.3 | 79955.1 | 3.7 | 3.7 | 7.1 | 7.1 | 0.0 | 0.0 |
| DEX0488_019.nt.3 | 79956 | 7.4 | 7.4 | 14.3 | 14.3 | 0.0 | 0.0 |
| DEX0488_019.nt.3 | 79956.1 | 3.7 | 3.7 | 7.1 | 7.1 | 0.0 | 0.0 |
| DEX0488_019.nt.3 | 79959 | 11.1 | 11.1 | 21.4 | 21.4 | 0.0 | 0.0 |
| DEX0488_019.nt.3 | 79959.1 | 11.1 | 11.1 | 21.4 | 21.4 | 0.0 | 0.0 |
| DEX0488_019.nt.3 | 79960 | 11.1 | 11.1 | 21.4 | 21.4 | 0.0 | 0.0 |
| DEX0488_019.nt.3 | 79960.1 | 18.5 | 18.5 | 28.6 | 28.6 | 7.7 | 7.7 |
| DEX0488_019.nt.3 | 79963 | 7.4 | 7.7 | 14.3 | 15.4 | 0.0 | 0.0 |
| DEX0488_019.nt.3 | 79963.1 | 3.7 | 3.8 | 7.1 | 7.7 | 0.0 | 0.0 |
| DEX0488_019.nt.3 | 79964 | 3.7 | 4.0 | 7.1 | 7.7 | 0.0 | 0.0 |
| DEX0488_019.nt.3 | 79964.1 | 7.4 | 7.4 | 14.3 | 14.3 | 0.0 | 0.0 |
| DEX0488_019.nt.4 | 79955 | 0.0 | 0.0 | 0.0 | 0.0 | 0.0 | 0.0 |
| DEX0488_019.nt.4 | 79955.1 | 3.7 | 3.7 | 7.1 | 7.1 | 0.0 | 0.0 |
| DEX0488_019.nt.4 | 79956 | 7.4 | 7.4 | 14.3 | 14.3 | 0.0 | 0.0 |
| DEX0488_019.nt.4 | 79956.1 | 3.7 | 3.7 | 7.1 | 7.1 | 0.0 | 0.0 |
| DEX0488_019.nt.4 | 79959 | 11.1 | 11.1 | 21.4 | 21.4 | 0.0 | 0.0 |
| DEX0488_019.nt.4 | 79959.1 | 11.1 | 11.1 | 21.4 | 21.4 | 0.0 | 0.0 |
| DEX0488_019.nt.4 | 79960 | 11.1 | 11.1 | 21.4 | 21.4 | 0.0 | 0.0 |
| DEX0488_019.nt.4 | 79960.1 | 18.5 | 18.5 | 28.6 | 28.6 | 7.7 | 7.7 |
| DEX0488_019.nt.4 | 79963 | 7.4 | 7.7 | 14.3 | 15.4 | 0.0 | 0.0 |
| DEX0488_019.nt.4 | 79963.1 | 3.7 | 3.8 | 7.1 | 7.7 | 0.0 | 0.0 |
| DEX0488_019.nt.4 | 79964 | 3.7 | 4.0 | 7.1 | 7.7 | 0.0 | 0.0 |
| DEX0488_019.nt.4 | 79964.1 | 7.4 | 7.4 | 14.3 | 14.3 | 0.0 | 0.0 |
| DEX0488_019.nt.5 | 79959 | 11.1 | 11.1 | 21.4 | 21.4 | 0.0 | 0.0 |
| DEX0488_019.nt.5 | 79959.1 | 11.1 | 11.1 | 21.4 | 21.4 | 0.0 | 0.0 |
| DEX0488_019.nt.5 | 79960 | 11.1 | 11.1 | 21.4 | 21.4 | 0.0 | 0.0 |
| DEX0488_019.nt.5 | 79960.1 | 18.5 | 18.5 | 28.6 | 28.6 | 7.7 | 7.7 |
| DEX0488_019.nt.6 | 79955 | 0.0 | 0.0 | 0.0 | 0.0 | 0.0 | 0.0 |
| DEX0488_019.nt.6 | 79955.1 | 3.7 | 3.7 | 7.1 | 7.1 | 0.0 | 0.0 |
| DEX0488_019.nt.6 | 79956 | 7.4 | 7.4 | 14.3 | 14.3 | 0.0 | 0.0 |
| DEX0488_019.nt.6 | 79956.1 | 3.7 | 3.7 | 7.1 | 7.1 | 0.0 | 0.0 |
| DEX0488_019.nt.6 | 79959 | 11.1 | 11.1 | 21.4 | 21.4 | 0.0 | 0.0 |
| DEX0488_019.nt.6 | 79959.1 | 11.1 | 11.1 | 21.4 | 21.4 | 0.0 | 0.0 |
| DEX0488_019.nt.6 | 79960 | 11.1 | 11.1 | 21.4 | 21.4 | 0.0 | 0.0 |
| DEX0488_019.nt.6 | 79960.1 | 18.5 | 18.5 | 28.6 | 28.6 | 7.7 | 7.7 |
| DEX0488_019.nt.6 | 79963 | 7.4 | 7.7 | 14.3 | 15.4 | 0.0 | 0.0 |
| DEX0488_019.nt.6 | 79963.1 | 3.7 | 3.8 | 7.1 | 7.7 | 0.0 | 0.0 |
| DEX0488_019.nt.6 | 79964 | 3.7 | 4.0 | 7.1 | 7.7 | 0.0 | 0.0 |
| DEX0488_019.nt.6 | 79964.1 | 7.4 | 7.4 | 14.3 | 14.3 | 0.0 | 0.0 |
| DEX0488_019.nt.7 | 79955 | 0.0 | 0.0 | 0.0 | 0.0 | 0.0 | 0.0 |
| DEX0488_019.nt.7 | 79955.1 | 3.7 | 3.7 | 7.1 | 7.1 | 0.0 | 0.0 |
| DEX0488_019.nt.7 | 79956 | 7.4 | 7.4 | 14.3 | 14.3 | 0.0 | 0.0 |
| DEX0488_019.nt.7 | 79956.1 | 3.7 | 3.7 | 7.1 | 7.1 | 0.0 | 0.0 |
| DEX0488_019.nt.7 | 79959 | 11.1 | 11.1 | 21.4 | 21.4 | 0.0 | 0.0 |
| DEX0488_019.nt.7 | 79959.1 | 11.1 | 11.1 | 21.4 | 21.4 | 0.0 | 0.0 |
| DEX0488_019.nt.7 | 79960 | 11.1 | 11.1 | 21.4 | 21.4 | 0.0 | 0.0 |
| DEX0488_019.nt.7 | 79960.1 | 18.5 | 18.5 | 28.6 | 28.6 | 7.7 | 7.7 |
| DEX0488_019.nt.7 | 79963 | 7.4 | 7.7 | 14.3 | 15.4 | 0.0 | 0.0 |
| DEX0488_019.nt.7 | 79963.1 | 3.7 | 3.8 | 7.1 | 7.7 | 0.0 | 0.0 |
| DEX0488_019.nt.7 | 79964 | 3.7 | 4.0 | 7.1 | 7.7 | 0.0 | 0.0 |
| DEX0488_019.nt.7 | 79964.1 | 7.4 | 7.4 | 14.3 | 14.3 | 0.0 | 0.0 |
| DEX0488_019.nt.8 | 79955 | 0.0 | 0.0 | 0.0 | 0.0 | 0.0 | 0.0 |
| DEX0488_019.nt.8 | 79955.1 | 3.7 | 3.7 | 7.1 | 7.1 | 0.0 | 0.0 |
| DEX0488_019.nt.8 | 79956 | 7.4 | 7.4 | 14.3 | 14.3 | 0.0 | 0.0 |
| DEX0488_019.nt.8 | 79956.1 | 3.7 | 3.7 | 7.1 | 7.1 | 0.0 | 0.0 |
| DEX0488_019.nt.8 | 79959 | 11.1 | 11.1 | 21.4 | 21.4 | 0.0 | 0.0 |
| DEX0488_019.nt.8 | 79959.1 | 11.1 | 11.1 | 21.4 | 21.4 | 0.0 | 0.0 |
| DEX0488_019.nt.8 | 79960 | 11.1 | 11.1 | 21.4 | 21.4 | 0.0 | 0.0 |
| DEX0488_019.nt.8 | 79960.1 | 18.5 | 18.5 | 28.6 | 28.6 | 7.7 | 7.7 |
| DEX0488_019.nt.8 | 79963 | 7.4 | 7.7 | 14.3 | 15.4 | 0.0 | 0.0 |
| DEX0488_019.nt.8 | 79963.1 | 3.7 | 3.8 | 7.1 | 7.7 | 0.0 | 0.0 |
| DEX0488_019.nt.8 | 79964 | 3.7 | 4.0 | 7.1 | 7.7 | 0.0 | 0.0 |
| DEX0488_019.nt.8 | 79964.1 | 7.4 | 7.4 | 14.3 | 14.3 | 0.0 | 0.0 |
| DEX0488_020.nt.1 | 77771 | 0.0 | 0.0 | 0.0 | 0.0 | 0.0 | 0.0 |
| DEX0488_020.nt.1 | 77771.1 | 0.0 | 0.0 | 0.0 | 0.0 | 0.0 | 0.0 |
| DEX0488_020.nt.1 | 77772 | 0.0 | 0.0 | 0.0 | 0.0 | 0.0 | 0.0 |
| DEX0488_020.nt.1 | 77772.1 | 0.0 | 0.0 | 0.0 | 0.0 | 0.0 | 0.0 |
| DEX0488_021.nt.1 | 21187 | 3.7 | 3.7 | 7.1 | 7.1 | 0.0 | 0.0 |
| DEX0488_021.nt.1 | 21187.1 | 3.7 | 3.7 | 7.1 | 7.1 | 0.0 | 0.0 |
| DEX0488_021.nt.1 | 78927 | 3.7 | 3.7 | 7.1 | 7.1 | 0.0 | 0.0 |
| DEX0488_021.nt.1 | 78927.1 | 7.4 | 7.4 | 14.3 | 14.3 | 0.0 | 0.0 |
| DEX0488_021.nt.1 | 78928 | 0.0 | 0.0 | 0.0 | 0.0 | 0.0 | 0.0 |
| DEX0488_021.nt.1 | 78928.1 | 0.0 | 0.0 | 0.0 | 0.0 | 0.0 | 0.0 |
| DEX0488_021.nt.2 | 21187 | 3.7 | 3.7 | 7.1 | 7.1 | 0.0 | 0.0 |
| DEX0488_021.nt.2 | 21187.1 | 3.7 | 3.7 | 7.1 | 7.1 | 0.0 | 0.0 |
| DEX0488_021.nt.2 | 78927 | 3.7 | 3.7 | 7.1 | 7.1 | 0.0 | 0.0 |
| DEX0488_021.nt.2 | 78927.1 | 7.4 | 7.4 | 14.3 | 14.3 | 0.0 | 0.0 |
| DEX0488_021.nt.2 | 78928 | 0.0 | 0.0 | 0.0 | 0.0 | 0.0 | 0.0 |
| DEX0488_021.nt.2 | 78928.1 | 0.0 | 0.0 | 0.0 | 0.0 | 0.0 | 0.0 |
| DEX0488_022.nt.1 | 79699 | 0.0 | 0.0 | 0.0 | 0.0 | 0.0 | 0.0 |
| DEX0488_022.nt.1 | 79699.1 | 0.0 | 0.0 | 0.0 | 0.0 | 0.0 | 0.0 |
| DEX0488_022.nt.1 | 79700 | 0.0 | 0.0 | 0.0 | 0.0 | 0.0 | 0.0 |
| DEX0488_022.nt.1 | 79700.1 | 0.0 | 0.0 | 0.0 | 0.0 | 0.0 | 0.0 |
| DEX0488_022.nt.2 | 79699 | 0.0 | 0.0 | 0.0 | 0.0 | 0.0 | 0.0 |
| DEX0488_022.nt.2 | 79699.1 | 0.0 | 0.0 | 0.0 | 0.0 | 0.0 | 0.0 |
| DEX0488_022.nt.2 | 79700 | 0.0 | 0.0 | 0.0 | 0.0 | 0.0 | 0.0 |
| DEX0488_022.nt.2 | 79700.1 | 0.0 | 0.0 | 0.0 | 0.0 | 0.0 | 0.0 |
| DEX0488_022.nt.3 | 79699 | 0.0 | 0.0 | 0.0 | 0.0 | 0.0 | 0.0 |
| DEX0488_022.nt.3 | 79699.1 | 0.0 | 0.0 | 0.0 | 0.0 | 0.0 | 0.0 |
| DEX0488_022.nt.3 | 79700 | 0.0 | 0.0 | 0.0 | 0.0 | 0.0 | 0.0 |
| DEX0488_022.nt.3 | 79700.1 | 0.0 | 0.0 | 0.0 | 0.0 | 0.0 | 0.0 |
| DEX0488_022.nt.4 | 79699 | 0.0 | 0.0 | 0.0 | 0.0 | 0.0 | 0.0 |
| DEX0488_022.nt.4 | 79699.1 | 0.0 | 0.0 | 0.0 | 0.0 | 0.0 | 0.0 |
| DEX0488_022.nt.4 | 79700 | 0.0 | 0.0 | 0.0 | 0.0 | 0.0 | 0.0 |
| DEX0488_022.nt.4 | 79700.1 | 0.0 | 0.0 | 0.0 | 0.0 | 0.0 | 0.0 |
| DEX0488_022.nt.5 | 79699 | 0.0 | 0.0 | 0.0 | 0.0 | 0.0 | 0.0 |
| DEX0488_022.nt.5 | 79699.1 | 0.0 | 0.0 | 0.0 | 0.0 | 0.0 | 0.0 |
| DEX0488_022.nt.5 | 79700 | 0.0 | 0.0 | 0.0 | 0.0 | 0.0 | 0.0 |
| DEX0488_022.nt.5 | 79700.1 | 0.0 | 0.0 | 0.0 | 0.0 | 0.0 | 0.0 |
| DEX0488_022.nt.6 | 79699 | 0.0 | 0.0 | 0.0 | 0.0 | 0.0 | 0.0 |
| DEX0488_022.nt.6 | 79699.1 | 0.0 | 0.0 | 0.0 | 0.0 | 0.0 | 0.0 |
| DEX0488_022.nt.6 | 79700 | 0.0 | 0.0 | 0.0 | 0.0 | 0.0 | 0.0 |
| DEX0488_022.nt.6 | 79700.1 | 0.0 | 0.0 | 0.0 | 0.0 | 0.0 | 0.0 |
| DEX0488_022.nt.7 | 79699 | 0.0 | 0.0 | 0.0 | 0.0 | 0.0 | 0.0 |
| DEX0488_022.nt.7 | 79699.1 | 0.0 | 0.0 | 0.0 | 0.0 | 0.0 | 0.0 |
| DEX0488_022.nt.7 | 79700 | 0.0 | 0.0 | 0.0 | 0.0 | 0.0 | 0.0 |
| DEX0488_022.nt.7 | 79700.1 | 0.0 | 0.0 | 0.0 | 0.0 | 0.0 | 0.0 |
| DEX0488_022.nt.8 | 79699 | 0.0 | 0.0 | 0.0 | 0.0 | 0.0 | 0.0 |
| DEX0488_022.nt.8 | 79699.1 | 0.0 | 0.0 | 0.0 | 0.0 | 0.0 | 0.0 |
| DEX0488_022.nt.8 | 79700 | 0.0 | 0.0 | 0.0 | 0.0 | 0.0 | 0.0 |
| DEX0488_022.nt.8 | 79700.1 | 0.0 | 0.0 | 0.0 | 0.0 | 0.0 | 0.0 |
| DEX0488_023.nt.1 | 78715 | 37.0 | 37.0 | 42.9 | 42.9 | 30.8 | 30.8 |
| DEX0488_023.nt.1 | 78715.1 | 33.3 | 36.0 | 35.7 | 38.5 | 30.8 | 33.3 |
| DEX0488_023.nt.1 | 78716 | 44.4 | 44.4 | 57.1 | 57.1 | 30.8 | 30.8 |
| DEX0488_023.nt.1 | 78716.1 | 48.1 | 48.1 | 57.1 | 57.1 | 38.5 | 38.5 |
| DEX0488_023.nt.2 | 78715 | 37.0 | 37.0 | 42.9 | 42.9 | 30.8 | 30.8 |
| DEX0488_023.nt.2 | 78715.1 | 33.3 | 36.0 | 35.7 | 38.5 | 30.8 | 33.3 |
| DEX0488_023.nt.2 | 78716 | 44.4 | 44.4 | 57.1 | 57.1 | 30.8 | 30.8 |
| DEX0488_023.nt.2 | 78716.1 | 48.1 | 48.1 | 57.1 | 57.1 | 38.5 | 38.5 |
| DEX0488_024.nt.1 | 79699 | 0.0 | 0.0 | 0.0 | 0.0 | 0.0 | 0.0 |
| DEX0488_024.nt.1 | 79699.1 | 0.0 | 0.0 | 0.0 | 0.0 | 0.0 | 0.0 |
| DEX0488_024.nt.1 | 79700 | 0.0 | 0.0 | 0.0 | 0.0 | 0.0 | 0.0 |
| DEX0488_024.nt.1 | 79700.1 | 0.0 | 0.0 | 0.0 | 0.0 | 0.0 | 0.0 |
| DEX0488_024.nt.2 | 79699 | 0.0 | 0.0 | 0.0 | 0.0 | 0.0 | 0.0 |
| DEX0488_024.nt.2 | 79699.1 | 0.0 | 0.0 | 0.0 | 0.0 | 0.0 | 0.0 |
| DEX0488_024.nt.2 | 79700 | 0.0 | 0.0 | 0.0 | 0.0 | 0.0 | 0.0 |
| DEX0488_024.nt.2 | 79700.1 | 0.0 | 0.0 | 0.0 | 0.0 | 0.0 | 0.0 |
| DEX0488_025.nt.1 | 90527 | 0.0 | 0.0 | 0.0 | 0.0 | 0.0 | 0.0 |
| DEX0488_025.nt.1 | 90527.1 | 0.0 | 0.0 | 0.0 | 0.0 | 0.0 | 0.0 |
| DEX0488_025.nt.1 | 90528 | 3.7 | 3.8 | 7.1 | 7.1 | 0.0 | 0.0 |
| DEX0488_025.nt.1 | 90528.1 | 3.7 | 3.8 | 7.1 | 7.1 | 0.0 | 0.0 |
| DEX0488_025.nt.1 | 90543 | 0.0 | 0.0 | 0.0 | 0.0 | 0.0 | 0.0 |
| DEX0488_025.nt.1 | 90543.1 | 0.0 | 0.0 | 0.0 | 0.0 | 0.0 | 0.0 |
| DEX0488_025.nt.1 | 90544 | 3.7 | 4.2 | 7.1 | 8.3 | 0.0 | 0.0 |
| DEX0488_025.nt.1 | 90544.1 | 3.7 | 3.8 | 7.1 | 7.1 | 0.0 | 0.0 |
| DEX0488_025.nt.1 | 91047 | 0.0 | 0.0 | 0.0 | 0.0 | 0.0 | 0.0 |
| DEX0488_025.nt.1 | 91047.1 | 0.0 | 0.0 | 0.0 | 0.0 | 0.0 | 0.0 |
| DEX0488_025.nt.1 | 91048 | 0.0 | 0.0 | 0.0 | 0.0 | 0.0 | 0.0 |
| DEX0488_025.nt.1 | 91048.1 | 0.0 | 0.0 | 0.0 | 0.0 | 0.0 | 0.0 |
| DEX0488_025.nt.1 | 91051 | 0.0 | 0.0 | 0.0 | 0.0 | 0.0 | 0.0 |
| DEX0488_025.nt.1 | 91051.1 | 0.0 | 0.0 | 0.0 | 0.0 | 0.0 | 0.0 |
| DEX0488_025.nt.1 | 91052 | 0.0 | 0.0 | 0.0 | 0.0 | 0.0 | 0.0 |
| DEX0488_025.nt.1 | 91052.1 | 0.0 | 0.0 | 0.0 | 0.0 | 0.0 | 0.0 |
| DEX0488_025.nt.1 | 91055 | 0.0 | 0.0 | 0.0 | 0.0 | 0.0 | 0.0 |
| DEX0488_025.nt.1 | 91055.1 | 0.0 | 0.0 | 0.0 | 0.0 | 0.0 | 0.0 |
| DEX0488_025.nt.1 | 91056 | 0.0 | 0.0 | 0.0 | 0.0 | 0.0 | 0.0 |
| DEX0488_025.nt.1 | 91056.1 | 0.0 | 0.0 | 0.0 | 0.0 | 0.0 | 0.0 |
| DEX0488_025.nt.1 | 91171 | 3.7 | 100.0 | 7.1 | 100.0 | 0.0 | 0.0 |
| DEX0488_025.nt.1 | 91171.1 | 0.0 | 0.0 | 0.0 | 0.0 | 0.0 | 0.0 |
| DEX0488_025.nt.1 | 91172 | 3.7 | 3.7 | 7.1 | 7.1 | 0.0 | 0.0 |
| DEX0488_025.nt.1 | 91172.1 | 3.7 | 5.6 | 7.1 | 12.5 | 0.0 | 0.0 |
| DEX0488_025.nt.1 | 91271 | 0.0 | 0.0 | 0.0 | 0.0 | 0.0 | 0.0 |
| DEX0488_025.nt.1 | 91271.1 | 0.0 | 0.0 | 0.0 | 0.0 | 0.0 | 0.0 |
| DEX0488_025.nt.1 | 91272 | 3.7 | 3.8 | 7.1 | 7.1 | 0.0 | 0.0 |
| DEX0488_025.nt.1 | 91272.1 | 3.7 | 3.8 | 7.1 | 7.1 | 0.0 | 0.0 |
| DEX0488_025.nt.1 | 91275 | 0.0 | 0.0 | 0.0 | 0.0 | 0.0 | 0.0 |
| DEX0488_025.nt.1 | 91275.1 | 0.0 | 0.0 | 0.0 | 0.0 | 0.0 | 0.0 |
| DEX0488_025.nt.1 | 91276 | 3.7 | 4.3 | 7.1 | 8.3 | 0.0 | 0.0 |
| DEX0488_025.nt.1 | 91276.1 | 3.7 | 3.8 | 7.1 | 7.1 | 0.0 | 0.0 |
| DEX0488_025.nt.2 | 90528 | 3.7 | 3.8 | 7.1 | 7.1 | 0.0 | 0.0 |
| DEX0488_025.nt.2 | 90528.1 | 3.7 | 3.8 | 7.1 | 7.1 | 0.0 | 0.0 |
| DEX0488_025.nt.2 | 90544 | 3.7 | 4.2 | 7.1 | 8.3 | 0.0 | 0.0 |
| DEX0488_025.nt.2 | 90544.1 | 3.7 | 3.8 | 7.1 | 7.1 | 0.0 | 0.0 |
| DEX0488_025.nt.2 | 91172 | 3.7 | 3.7 | 7.1 | 7.1 | 0.0 | 0.0 |
| DEX0488_025.nt.2 | 91172.1 | 3.7 | 5.6 | 7.1 | 12.5 | 0.0 | 0.0 |
| DEX0488_025.nt.2 | 91272 | 3.7 | 3.8 | 7.1 | 7.1 | 0.0 | 0.0 |
| DEX0488_025.nt.2 | 91272.1 | 3.7 | 3.8 | 7.1 | 7.1 | 0.0 | 0.0 |
| DEX0488_025.nt.2 | 91276 | 3.7 | 4.3 | 7.1 | 8.3 | 0.0 | 0.0 |
| DEX0488_025.nt.2 | 91276.1 | 3.7 | 3.8 | 7.1 | 7.1 | 0.0 | 0.0 |
| DEX0488_026.nt.1 | 24160 | 0.0 | 0.0 | 0.0 | 0.0 | 0.0 | 0.0 |
| DEX0488_026.nt.1 | 24160.1 | 0.0 | 0.0 | 0.0 | 0.0 | 0.0 | 0.0 |
| DEX0488_026.nt.1 | 24160.2 | 0.0 | 0.0 | 0.0 | 0.0 | 0.0 | 0.0 |
| DEX0488_026.nt.1 | 24160.3 | 0.0 | 0.0 | 0.0 | 0.0 | 0.0 | 0.0 |
| DEX0488_026.nt.1 | 26816 | 0.0 | 0.0 | 0.0 | 0.0 | 0.0 | 0.0 |
| DEX0488_026.nt.1 | 26816.1 | 0.0 | 0.0 | 0.0 | 0.0 | 0.0 | 0.0 |
| DEX0488_027.nt.1 | 17852 | 77.8 | 77.8 | 85.7 | 85.7 | 69.2 | 69.2 |
| DEX0488_027.nt.1 | 17852.1 | 77.8 | 77.8 | 85.7 | 85.7 | 69.2 | 69.2 |
| DEX0488_027.nt.1 | 17853 | 81.5 | 81.5 | 92.9 | 92.9 | 69.2 | 69.2 |
| DEX0488_027.nt.1 | 17853.1 | 85.2 | 85.2 | 92.9 | 92.9 | 76.9 | 76.9 |
| DEX0488_027.nt.1 | 18644 | 77.8 | 77.8 | 85.7 | 85.7 | 69.2 | 69.2 |
| DEX0488_027.nt.1 | 18644.1 | 77.8 | 77.8 | 85.7 | 85.7 | 69.2 | 69.2 |
| DEX0488_027.nt.1 | 18644.2 | 74.1 | 76.9 | 78.6 | 84.6 | 69.2 | 69.2 |
| DEX0488_027.nt.1 | 18644.3 | 81.5 | 81.5 | 92.9 | 92.9 | 69.2 | 69.2 |
| DEX0488_027.nt.1 | 18645 | 81.5 | 81.5 | 92.9 | 92.9 | 69.2 | 69.2 |
| DEX0488_027.nt.1 | 18645.1 | 81.5 | 81.5 | 92.9 | 92.9 | 69.2 | 69.2 |
| DEX0488_027.nt.1 | 18645.2 | 81.5 | 81.5 | 92.9 | 92.9 | 69.2 | 69.2 |
| DEX0488_027.nt.1 | 18645.3 | 85.2 | 85.2 | 92.9 | 92.9 | 76.9 | 76.9 |
| DEX0488_027.nt.1 | 41955 | 74.1 | 74.1 | 85.7 | 85.7 | 61.5 | 61.5 |
| DEX0488_027.nt.1 | 41955.1 | 77.8 | 77.8 | 85.7 | 85.7 | 69.2 | 69.2 |
| DEX0488_027.nt.1 | 41955.2 | 77.8 | 77.8 | 85.7 | 85.7 | 69.2 | 69.2 |
| DEX0488_027.nt.1 | 41955.3 | 77.8 | 77.8 | 85.7 | 85.7 | 69.2 | 69.2 |
| DEX0488_027.nt.1 | 41955.4 | 74.1 | 76.9 | 85.7 | 85.7 | 61.5 | 66.7 |
| DEX0488_027.nt.1 | 41956 | 66.7 | 66.7 | 78.6 | 78.6 | 53.8 | 53.8 |
| DEX0488_027.nt.1 | 41956.1 | 48.1 | 76.5 | 64.3 | 90.0 | 30.8 | 57.1 |
| DEX0488_027.nt.1 | 41956.2 | 70.4 | 70.4 | 85.7 | 85.7 | 53.8 | 53.8 |
| DEX0488_027.nt.1 | 41956.3 | 74.1 | 74.1 | 85.7 | 85.7 | 61.5 | 61.5 |
| DEX0488_027.nt.1 | 41956.4 | 77.8 | 77.8 | 85.7 | 85.7 | 69.2 | 69.2 |
| DEX0488_027.nt.2 | 17852 | 77.8 | 77.8 | 85.7 | 85.7 | 69.2 | 69.2 |
| DEX0488_027.nt.2 | 17852.1 | 77.8 | 77.8 | 85.7 | 85.7 | 69.2 | 69.2 |
| DEX0488_027.nt.2 | 17853 | 81.5 | 81.5 | 92.9 | 92.9 | 69.2 | 69.2 |
| DEX0488_027.nt.2 | 17853.1 | 85.2 | 85.2 | 92.9 | 92.9 | 76.9 | 76.9 |
| DEX0488_027.nt.2 | 18644 | 77.8 | 77.8 | 85.7 | 85.7 | 69.2 | 69.2 |
| DEX0488_027.nt.2 | 18644.1 | 77.8 | 77.8 | 85.7 | 85.7 | 69.2 | 69.2 |
| DEX0488_027.nt.2 | 18644.2 | 74.1 | 76.9 | 78.6 | 84.6 | 69.2 | 69.2 |
| DEX0488_027.nt.2 | 18644.3 | 81.5 | 81.5 | 92.9 | 92.9 | 69.2 | 69.2 |
| DEX0488_027.nt.2 | 18645 | 81.5 | 81.5 | 92.9 | 92.9 | 69.2 | 69.2 |
| DEX0488_027.nt.2 | 18645.1 | 81.5 | 81.5 | 92.9 | 92.9 | 69.2 | 69.2 |
| DEX0488_027.nt.2 | 18645.2 | 81.5 | 81.5 | 92.9 | 92.9 | 69.2 | 69.2 |
| DEX0488_027.nt.2 | 18645.3 | 85.2 | 85.2 | 92.9 | 92.9 | 76.9 | 76.9 |
| DEX0488_027.nt.3 | 17852 | 77.8 | 77.8 | 85.7 | 85.7 | 69.2 | 69.2 |
| DEX0488_027.nt.3 | 17852.1 | 77.8 | 77.8 | 85.7 | 85.7 | 69.2 | 69.2 |
| DEX0488_027.nt.3 | 17853 | 81.5 | 81.5 | 92.9 | 92.9 | 69.2 | 69.2 |
| DEX0488_027.nt.3 | 17853.1 | 85.2 | 85.2 | 92.9 | 92.9 | 76.9 | 76.9 |
| DEX0488_027.nt.3 | 18644 | 77.8 | 77.8 | 85.7 | 85.7 | 69.2 | 69.2 |
| DEX0488_027.nt.3 | 18644.1 | 77.8 | 77.8 | 85.7 | 85.7 | 69.2 | 69.2 |
| DEX0488_027.nt.3 | 18644.2 | 74.1 | 76.9 | 78.6 | 84.6 | 69.2 | 69.2 |
| DEX0488_027.nt.3 | 18644.3 | 81.5 | 81.5 | 92.9 | 92.9 | 69.2 | 69.2 |
| DEX0488_027.nt.3 | 18645 | 81.5 | 81.5 | 92.9 | 92.9 | 69.2 | 69.2 |
| DEX0488_027.nt.3 | 18645.1 | 81.5 | 81.5 | 92.9 | 92.9 | 69.2 | 69.2 |
| DEX0488_027.nt.3 | 18645.2 | 81.5 | 81.5 | 92.9 | 92.9 | 69.2 | 69.2 |
| DEX0488_027.nt.3 | 18645.3 | 85.2 | 85.2 | 92.9 | 92.9 | 76.9 | 76.9 |
| DEX0488_027.nt.4 | 17852 | 77.8 | 77.8 | 85.7 | 85.7 | 69.2 | 69.2 |
| DEX0488_027.nt.4 | 17852.1 | 77.8 | 77.8 | 85.7 | 85.7 | 69.2 | 69.2 |
| DEX0488_027.nt.4 | 17853 | 81.5 | 81.5 | 92.9 | 92.9 | 69.2 | 69.2 |
| DEX0488_027.nt.4 | 17853.1 | 85.2 | 85.2 | 92.9 | 92.9 | 76.9 | 76.9 |
| DEX0488_027.nt.4 | 18644 | 77.8 | 77.8 | 85.7 | 85.7 | 69.2 | 69.2 |
| DEX0488_027.nt.4 | 18644.1 | 77.8 | 77.8 | 85.7 | 85.7 | 69.2 | 69.2 |
| DEX0488_027.nt.4 | 18644.2 | 74.1 | 76.9 | 78.6 | 84.6 | 69.2 | 69.2 |
| DEX0488_027.nt.4 | 18644.3 | 81.5 | 81.5 | 92.9 | 92.9 | 69.2 | 69.2 |
| DEX0488_027.nt.4 | 18645 | 81.5 | 81.5 | 92.9 | 92.9 | 69.2 | 69.2 |
| DEX0488_027.nt.4 | 18645.1 | 81.5 | 81.5 | 92.9 | 92.9 | 69.2 | 69.2 |
| DEX0488_027.nt.4 | 18645.2 | 81.5 | 81.5 | 92.9 | 92.9 | 69.2 | 69.2 |
| DEX0488_027.nt.4 | 18645.3 | 85.2 | 85.2 | 92.9 | 92.9 | 76.9 | 76.9 |
| DEX0488_028.nt.1 | 33088 | 14.8 | 14.8 | 21.4 | 21.4 | 7.7 | 7.7 |
| DEX0488_028.nt.1 | 33088.1 | 11.1 | 11.1 | 14.3 | 14.3 | 7.7 | 7.7 |
| DEX0488_028.nt.1 | 33088.2 | 11.1 | 11.1 | 14.3 | 14.3 | 7.7 | 7.7 |
| DEX0488_028.nt.1 | 33088.3 | 11.1 | 11.1 | 14.3 | 14.3 | 7.7 | 7.7 |
| DEX0488_029.nt.1 | 79635 | 22.2 | 22.2 | 35.7 | 35.7 | 7.7 | 7.7 |
| DEX0488_029.nt.1 | 79635.1 | 29.6 | 29.6 | 35.7 | 35.7 | 23.1 | 23.1 |
| DEX0488_030.nt.1 | 35317 | 0.0 | 0.0 | 0.0 | 0.0 | 0.0 | 0.0 |
| DEX0488_030.nt.1 | 35317.1 | 0.0 | 0.0 | 0.0 | 0.0 | 0.0 | 0.0 |
| DEX0488_031.nt.1 | 78587 | 22.2 | 22.2 | 28.6 | 28.6 | 15.4 | 15.4 |
| DEX0488_031.nt.1 | 78587.1 | 25.9 | 25.9 | 28.6 | 28.6 | 23.1 | 23.1 |
| DEX0488_031.nt.1 | 78588 | 22.2 | 22.2 | 28.6 | 28.6 | 15.4 | 15.4 |
| DEX0488_031.nt.1 | 78588.1 | 29.6 | 29.6 | 28.6 | 28.6 | 30.8 | 30.8 |
| DEX0488_032.nt.1 | 78711 | 18.5 | 18.5 | 7.1 | 7.1 | 30.8 | 30.8 |
| DEX0488_032.nt.1 | 78711.1 | 22.2 | 22.2 | 7.1 | 7.1 | 38.5 | 38.5 |
| DEX0488_032.nt.1 | 78712 | 18.5 | 18.5 | 7.1 | 7.1 | 30.8 | 30.8 |
| DEX0488_032.nt.1 | 78712.1 | 18.5 | 18.5 | 7.1 | 7.1 | 30.8 | 30.8 |
| DEX0488_033.nt.1 | 79019 | 14.8 | 16.7 | 28.6 | 30.8 | 0.0 | 0.0 |
| DEX0488_033.nt.1 | 79019.1 | 14.8 | 18.2 | 28.6 | 36.4 | 0.0 | 0.0 |
| DEX0488_033.nt.1 | 79020 | 14.8 | 16.0 | 28.6 | 28.6 | 0.0 | 0.0 |
| DEX0488_033.nt.1 | 79020.1 | 11.1 | 12.0 | 21.4 | 23.1 | 0.0 | 0.0 |
| DEX0488_033.nt.2 | 79019 | 14.8 | 16.7 | 28.6 | 30.8 | 0.0 | 0.0 |
| DEX0488_033.nt.2 | 79019.1 | 14.8 | 18.2 | 28.6 | 36.4 | 0.0 | 0.0 |
| DEX0488_033.nt.2 | 79020 | 14.8 | 16.0 | 28.6 | 28.6 | 0.0 | 0.0 |
| DEX0488_033.nt.2 | 79020.1 | 11.1 | 12.0 | 21.4 | 23.1 | 0.0 | 0.0 |
| DEX0488_034.nt.1 | 90123 | 18.5 | 83.3 | 14.3 | 66.7 | 23.1 | 100.0 |
| DEX0488_034.nt.1 | 90123.1 | 22.2 | 66.7 | 14.3 | 50.0 | 30.8 | 80.0 |
| DEX0488_034.nt.1 | 90124 | 22.2 | 85.7 | 14.3 | 66.7 | 30.8 | 100.0 |
| DEX0488_034.nt.1 | 90124.1 | 25.9 | 70.0 | 21.4 | 50.0 | 30.8 | 100.0 |
| DEX0488_035.nt.1 | 79903 | 29.6 | 30.8 | 42.9 | 42.9 | 15.4 | 16.7 |
| DEX0488_035.nt.1 | 79903.1 | 29.6 | 29.6 | 42.9 | 42.9 | 15.4 | 15.4 |
| DEX0488_035.nt.1 | 79904 | 33.3 | 36.0 | 50.0 | 50.0 | 15.4 | 18.2 |
| DEX0488_035.nt.1 | 79904.1 | 33.3 | 34.6 | 50.0 | 53.8 | 15.4 | 15.4 |
| DEX0488_035.nt.2 | 79903 | 29.6 | 30.8 | 42.9 | 42.9 | 15.4 | 16.7 |
| DEX0488_035.nt.2 | 79903.1 | 29.6 | 29.6 | 42.9 | 42.9 | 15.4 | 15.4 |
| DEX0488_035.nt.2 | 79904 | 33.3 | 36.0 | 50.0 | 50.0 | 15.4 | 18.2 |
| DEX0488_035.nt.2 | 79904.1 | 33.3 | 34.6 | 50.0 | 53.8 | 15.4 | 15.4 |
| DEX0488_036.nt.1 | 3976 | 14.8 | 36.4 | 14.3 | 33.3 | 15.4 | 40.0 |
| DEX0488_036.nt.1 | 3976.1 | 18.5 | 22.7 | 14.3 | 15.4 | 23.1 | 33.3 |
| DEX0488_036.nt.1 | 3977 | 14.8 | 17.4 | 7.1 | 7.7 | 23.1 | 30.0 |
| DEX0488_036.nt.1 | 3977.1 | 14.8 | 21.1 | 7.1 | 9.1 | 23.1 | 37.5 |
| DEX0488_036.nt.2 | 3976 | 14.8 | 36.4 | 14.3 | 33.3 | 15.4 | 40.0 |
| DEX0488_036.nt.2 | 3976.1 | 18.5 | 22.7 | 14.3 | 15.4 | 23.1 | 33.3 |
| DEX0488_036.nt.2 | 3977 | 14.8 | 17.4 | 7.1 | 7.7 | 23.1 | 30.0 |
| DEX0488_036.nt.2 | 3977.1 | 14.8 | 21.1 | 7.1 | 9.1 | 23.1 | 37.5 |

[0501] For the colon cancer and disease experiments on the UniDEX1 (UD1) chip a total of 74 samples, comparing the expression patterns of colon cancer or disease derived RNA to RNA isolated from a pool of 9 normal colon tissues. The sample distribution was as follows: 12 early Adenomas, 9 Stage I cancers, 11 Stage II cancers, 12 Stage III cancers, 7 Metastatic cancers (6 Liver metastases and 1 metastatic lymph node), 10 Crohn's disease, 9 Ulcerative colitis (6 active, 2 inactive and 1 unspecified) and 4 adenomatous polyps (2 FAP and 2 spontaneous). The tissues were purchased from Ardais Corporation (Lexington, Mass.). The results for the statistically significant up-regulated nucleic acid sequences on UniDEX1 Chip are shown in Table(s) 11-12.

[0502] The first two columns of each table contain information about the sequence itself (DEX ID, Oligo Name), the next columns show the results obtained for benign colon disease samples (“Cln Bngn”), colon adenoma samples (“Cln Adno”), all colon cancer samples (“Cln ALL Can”), all colon cancer samples excluding metastatic samples (“Cln ALL Can NO Met”), ulcerative colitis samples (“Cln Clts”), Crohn's disease samples (“Cln Chm”), metastatic colon cancer samples (“Cln Met Can”), stage I colon cancer samples (“Cln Stg I”), stage II colon cancer samples (“Cln Stg II”) and stage III colon cancer samples (“Cln Stg III”). ‘% up’ indicates the percentage of all experiments in which up-regulation of at least 1.8-fold was, ‘% valid up’ indicates the percentage of experiments with valid expression values in which up-regulation of at least 1.8-fold was observed.

TABLE 11

| | | | | | | | | | Cln | | |
|---|---|---|---|---|---|---|---|---|---|---|---|
| | | | | | | | | Cln | ALL | | |
| | | | | | | | Cln | ALL | Can | | |
| | | | Cln | | Cln | Cln | ALL | Can | NO | | Cln |
| | | Cln | Bngn | Cln | Adno | ALL | Can | NO | Met | Cln | Clts |
| | | Bngn | UD1 % | Adno | UD1 % | Can | UD1 % | Met | UD1 % | Clts | UD1 % |
| | | UD1 | valid | UD1 | valid | UD1 | valid | UD1 | valid | UD1 | valid |
| | Oligo | % up | up | % up | up | % up | up | % up | up | % up | up |
| DEX ID | Name | n = 19 | n = 19 | n = 12 | n = 12 | n = 38 | n = 38 | n = 32 | n = 32 | n = 9 | n = 9 |
| DEX0488_{—} | A_23_{—} | 42.11 | 42.11 | 0.0 | 0.0 | 26.32 | 26.32 | 21.88 | 21.88 | 11.11 | 11.11 |
| 001.nt.1 | P40174 | | | | | | | | | | |
| DEX0488_{—} | A_23_{—} | 42.11 | 42.11 | 0.0 | 0.0 | 26.32 | 26.32 | 21.88 | 21.88 | 11.11 | 11.11 |
| 001.nt.10 | P40174 | | | | | | | | | | |
| DEX0488_{—} | A_23_{—} | 42.11 | 42.11 | 0.0 | 0.0 | 26.32 | 26.32 | 21.88 | 21.88 | 11.11 | 11.11 |
| 001.nt.11 | P40174 | | | | | | | | | | |
| DEX0488_{—} | A_23_{—} | 42.11 | 42.11 | 0.0 | 0.0 | 26.32 | 26.32 | 21.88 | 21.88 | 11.11 | 11.11 |
| 001.nt.2 | P40174 | | | | | | | | | | |
| DEX0488_{—} | A_23_{—} | 42.11 | 42.11 | 0.0 | 0.0 | 26.32 | 26.32 | 21.88 | 21.88 | 11.11 | 11.11 |
| 001.nt.3 | P40174 | | | | | | | | | | |
| DEX0488_{—} | A_23_{—} | 42.11 | 42.11 | 0.0 | 0.0 | 26.32 | 26.32 | 21.88 | 21.88 | 11.11 | 11.11 |
| 001.nt.4 | P40174 | | | | | | | | | | |
| DEX0488_{—} | A_23_{—} | 42.11 | 42.11 | 0.0 | 0.0 | 26.32 | 26.32 | 21.88 | 21.88 | 11.11 | 11.11 |
| 001.nt.5 | P40174 | | | | | | | | | | |
| DEX0488_{—} | A_23_{—} | 42.11 | 42.11 | 0.0 | 0.0 | 26.32 | 26.32 | 21.88 | 21.88 | 11.11 | 11.11 |
| 001.nt.6 | P40174 | | | | | | | | | | |
| DEX0488_{—} | A_23_{—} | 42.11 | 42.11 | 0.0 | 0.0 | 26.32 | 26.32 | 21.88 | 21.88 | 11.11 | 11.11 |
| 001.nt.7 | P40174 | | | | | | | | | | |
| DEX0488_{—} | A_23_{—} | 42.11 | 42.11 | 0.0 | 0.0 | 26.32 | 26.32 | 21.88 | 21.88 | 11.11 | 11.11 |
| 001.nt.8 | P40174 | | | | | | | | | | |
| DEX0488_{—} | A_23_{—} | 42.11 | 42.11 | 0.0 | 0.0 | 26.32 | 26.32 | 21.88 | 21.88 | 11.11 | 11.11 |
| 001.nt.9 | P40174 | | | | | | | | | | |
| DEX0488_{—} | A_23_{—} | 0.0 | 0.0 | 0.0 | 0.0 | 2.63 | 100.0 | 3.13 | 100.0 | 0.0 | 0.0 |
| 002.nt.1 | P48886 | | | | | | | | | | |
| DEX0488_{—} | A_23_{—} | 10.53 | 10.53 | 0.0 | 0.0 | 5.26 | 5.56 | 6.25 | 6.45 | 11.11 | 11.11 |
| 003.nt.1 | P121533 | | | | | | | | | | |
| DEX0488_{—} | A_23_{—} | 10.53 | 10.53 | 0.0 | 0.0 | 5.26 | 5.56 | 6.25 | 6.45 | 11.11 | 11.11 |
| 003.nt.2 | P121533 | | | | | | | | | | |
| DEX0488_{—} | A_23_{—} | 10.53 | 10.53 | 0.0 | 0.0 | 5.26 | 5.56 | 6.25 | 6.45 | 11.11 | 11.11 |
| 003.nt.3 | P121533 | | | | | | | | | | |
| DEX0488_{—} | A_23_{—} | 10.53 | 10.53 | 0.0 | 0.0 | 5.26 | 5.56 | 6.25 | 6.45 | 11.11 | 11.11 |
| 003.nt.4 | P121533 | | | | | | | | | | |
| DEX0488_{—} | A_23_{—} | 10.53 | 10.53 | 0.0 | 0.0 | 5.26 | 5.56 | 6.25 | 6.45 | 11.11 | 11.11 |
| 003.nt.5 | P121533 | | | | | | | | | | |
| DEX0488_{—} | A_23_{—} | 10.53 | 10.53 | 0.0 | 0.0 | 5.26 | 5.56 | 6.25 | 6.45 | 11.11 | 11.11 |
| 003.nt.6 | P121533 | | | | | | | | | | |
| DEX0488_{—} | A_23_{—} | 10.53 | 10.53 | 0.0 | 0.0 | 5.26 | 5.56 | 6.25 | 6.45 | 11.11 | 11.11 |
| 003.nt.7 | P121533 | | | | | | | | | | |
| DEX0488_{—} | 10666 | 5.26 | 50.0 | 0.0 | 0.0 | 5.26 | 16.67 | 6.25 | 18.18 | 11.11 | 100.0 |
| 004.nt.1 | | | | | | | | | | | |
| DEX0488_{—} | A_23_{—} | 0.0 | 0.0 | 0.0 | 0.0 | 0.0 | 0.0 | 0.0 | 0.0 | 0.0 | 0.0 |
| 005.nt.1 | P123276 | | | | | | | | | | |
| DEX0488_{—} | A_23_{—} | 78.95 | 78.95 | 0.0 | 0.0 | 21.05 | 26.67 | 25.0 | 30.77 | 66.67 | 66.67 |
| 006.nt.1 | P218128 | | | | | | | | | | |
| DEX0488_{—} | A_23_{—} | 36.84 | 36.84 | 41.67 | 41.67 | 34.21 | 34.21 | 34.38 | 34.38 | 33.33 | 33.33 |
| 008.nt.1 | P257296 | | | | | | | | | | |
| DEX0488_{—} | A_23_{—} | 36.84 | 36.84 | 41.67 | 41.67 | 34.21 | 34.21 | 34.38 | 34.38 | 33.33 | 33.33 |
| 008.nt.2 | P257296 | | | | | | | | | | |
| DEX0488_{—} | A_23_{—} | 15.79 | 18.75 | 0.0 | 0.0 | 0.0 | 0.0 | 0.0 | 0.0 | 11.11 | 16.67 |
| 009.nt.1 | P84596 | | | | | | | | | | |
| DEX0488_{—} | A_23_{—} | 0.0 | 0.0 | 0.0 | 0.0 | 0.0 | 0.0 | 0.0 | 0.0 | 0.0 | 0.0 |
| 011.nt.1 | P9571 | | | | | | | | | | |
| DEX0488_{—} | A_23_{—} | 0.0 | 0.0 | 8.33 | 16.67 | 0.0 | 0.0 | 0.0 | 0.0 | 0.0 | 0.0 |
| 012.nt.1 | P64828 | | | | | | | | | | |
| DEX0488_{—} | A_23_{—} | 0.0 | 0.0 | 0.0 | 0.0 | 0.0 | 0.0 | 0.0 | 0.0 | 0.0 | 0.0 |
| 013.nt.1 | P118174 | | | | | | | | | | |
| DEX0488_{—} | A_23_{—} | 0.0 | 0.0 | 0.0 | 0.0 | 0.0 | 0.0 | 0.0 | 0.0 | 0.0 | 0.0 |
| 013.nt.2 | P118174 | | | | | | | | | | |
| DEX0488_{—} | A_23_{—} | 0.0 | 0.0 | 0.0 | 0.0 | 7.89 | 8.57 | 9.38 | 10.0 | 0.0 | 0.0 |
| 014.nt.1 | P114783 | | | | | | | | | | |
| DEX0488_{—} | A_23_{—} | 0.0 | 0.0 | 0.0 | 0.0 | 7.89 | 8.57 | 9.38 | 10.0 | 0.0 | 0.0 |
| 014.nt.2 | P114783 | | | | | | | | | | |
| DEX0488_{—} | A_23_{—} | 0.0 | 0.0 | 0.0 | 0.0 | 7.89 | 8.57 | 9.38 | 10.0 | 0.0 | 0.0 |
| 014.nt.3 | P114783 | | | | | | | | | | |
| DEX0488_{—} | A_23_{—} | 0.0 | 0.0 | 0.0 | 0.0 | 7.89 | 8.57 | 9.38 | 10.0 | 0.0 | 0.0 |
| 014.nt.4 | P114783 | | | | | | | | | | |
| DEX0488_{—} | A_23_{—} | 0.0 | 0.0 | 41.67 | 41.67 | 15.79 | 16.22 | 12.5 | 12.5 | 0.0 | 0.0 |
| 015.nt.1 | P167005 | | | | | | | | | | |
| DEX0488_{—} | A_23_{—} | 0.0 | 0.0 | 41.67 | 41.67 | 15.79 | 16.22 | 12.5 | 12.5 | 0.0 | 0.0 |
| 015.nt.2 | P167005 | | | | | | | | | | |
| DEX0488_{—} | A_23_{—} | 0.0 | 0.0 | 0.0 | 0.0 | 0.0 | 0.0 | 0.0 | 0.0 | 0.0 | 0.0 |
| 016.nt.8 | P120974 | | | | | | | | | | |
| DEX0488_{—} | A_23_{—} | 0.0 | 0.0 | 0.0 | 0.0 | 2.63 | 50.0 | 3.13 | 50.0 | 0.0 | 0.0 |
| 018.nt.1 | P206632 | | | | | | | | | | |
| DEX0488_{—} | A_23_{—} | 0.0 | 0.0 | 8.33 | 8.33 | 0.0 | 0.0 | 0.0 | 0.0 | 0.0 | 0.0 |
| 018.nt.1 | P22052 | | | | | | | | | | |
| DEX0488_{—} | A_23_{—} | 0.0 | 0.0 | 0.0 | 0.0 | 2.63 | 50.0 | 3.13 | 50.0 | 0.0 | 0.0 |
| 018.nt.2 | P206632 | | | | | | | | | | |
| DEX0488_{—} | A_23_{—} | 0.0 | 0.0 | 8.33 | 8.33 | 0.0 | 0.0 | 0.0 | 0.0 | 0.0 | 0.0 |
| 018.nt.2 | P22052 | | | | | | | | | | |
| DEX0488_{—} | A_23_{—} | 0.0 | 0.0 | 0.0 | 0.0 | 2.63 | 50.0 | 3.13 | 50.0 | 0.0 | 0.0 |
| 018.nt.3 | P206632 | | | | | | | | | | |
| DEX0488_{—} | A_23_{—} | 0.0 | 0.0 | 8.33 | 8.33 | 0.0 | 0.0 | 0.0 | 0.0 | 0.0 | 0.0 |
| 018.nt.3 | P22052 | | | | | | | | | | |
| DEX0488_{—} | A_23_{—} | 0.0 | 0.0 | 0.0 | 0.0 | 2.63 | 50.0 | 3.13 | 50.0 | 0.0 | 0.0 |
| 018.nt.4 | P206632 | | | | | | | | | | |
| DEX0488_{—} | A_23_{—} | 0.0 | 0.0 | 8.33 | 8.33 | 0.0 | 0.0 | 0.0 | 0.0 | 0.0 | 0.0 |
| 018.nt.4 | P22052 | | | | | | | | | | |
| DEX0488_{—} | A_23_{—} | 0.0 | 0.0 | 0.0 | 0.0 | 2.63 | 50.0 | 3.13 | 50.0 | 0.0 | 0.0 |
| 018.nt.5 | P206632 | | | | | | | | | | |
| DEX0488_{—} | A_23_{—} | 0.0 | 0.0 | 8.33 | 8.33 | 0.0 | 0.0 | 0.0 | 0.0 | 0.0 | 0.0 |
| 018.nt.5 | P22052 | | | | | | | | | | |
| DEX0488_{—} | A_23_{—} | 0.0 | 0.0 | 0.0 | 0.0 | 2.63 | 50.0 | 3.13 | 50.0 | 0.0 | 0.0 |
| 018.nt.6 | P206632 | | | | | | | | | | |
| DEX0488_{—} | A_23_{—} | 0.0 | 0.0 | 8.33 | 8.33 | 0.0 | 0.0 | 0.0 | 0.0 | 0.0 | 0.0 |
| 018.nt.6 | P22052 | | | | | | | | | | |
| DEX0488_{—} | A_23_{—} | 0.0 | 0.0 | 0.0 | 0.0 | 2.63 | 50.0 | 3.13 | 50.0 | 0.0 | 0.0 |
| 018.nt.7 | P206632 | | | | | | | | | | |
| DEX0488_{—} | A_23_{—} | 0.0 | 0.0 | 8.33 | 8.33 | 0.0 | 0.0 | 0.0 | 0.0 | 0.0 | 0.0 |
| 018.nt.7 | P22052 | | | | | | | | | | |
| DEX0488_{—} | A_23_{—} | 0.0 | 0.0 | 0.0 | 0.0 | 2.63 | 50.0 | 3.13 | 50.0 | 0.0 | 0.0 |
| 018.nt.8 | P206632 | | | | | | | | | | |
| DEX0488_{—} | A_23_{—} | 0.0 | 0.0 | 8.33 | 8.33 | 0.0 | 0.0 | 0.0 | 0.0 | 0.0 | 0.0 |
| 018.nt.8 | P22052 | | | | | | | | | | |
| DEX0488_{—} | A_23_{—} | 0.0 | 0.0 | 0.0 | 0.0 | 0.0 | 0.0 | 0.0 | 0.0 | 0.0 | 0.0 |
| 019.nt.3 | P118174 | | | | | | | | | | |
| DEX0488_{—} | A_23_{—} | 0.0 | 0.0 | 0.0 | 0.0 | 0.0 | 0.0 | 0.0 | 0.0 | 0.0 | 0.0 |
| 019.nt.6 | P118174 | | | | | | | | | | |
| DEX0488_{—} | A_23_{—} | 0.0 | 0.0 | 0.0 | 0.0 | 0.0 | 0.0 | 0.0 | 0.0 | 0.0 | 0.0 |
| 019.nt.8 | P118174 | | | | | | | | | | |
| DEX0488_{—} | 77771 | 0.0 | 0.0 | 0.0 | 0.0 | 0.0 | 0.0 | 0.0 | 0.0 | 0.0 | 0.0 |
| 020.nt.1 | | | | | | | | | | | |
| DEX0488_{—} | A_23_{—} | 0.0 | 0.0 | 0.0 | 0.0 | 0.0 | 0.0 | 0.0 | 0.0 | 0.0 | 0.0 |
| 022.nt.2 | P101025 | | | | | | | | | | |
| DEX0488_{—} | A_23_{—} | 0.0 | 0.0 | 0.0 | 0.0 | 0.0 | 0.0 | 0.0 | 0.0 | 0.0 | 0.0 |
| 022.nt.2 | P116557 | | | | | | | | | | |
| DEX0488_{—} | A_23_{—} | 0.0 | 0.0 | 0.0 | 0.0 | 0.0 | 0.0 | 0.0 | 0.0 | 0.0 | 0.0 |
| 022.nt.3 | P101025 | | | | | | | | | | |
| DEX0488_{—} | A_23_{—} | 0.0 | 0.0 | 0.0 | 0.0 | 0.0 | 0.0 | 0.0 | 0.0 | 0.0 | 0.0 |
| 022.nt.3 | P116557 | | | | | | | | | | |
| DEX0488_{—} | A_23_{—} | 0.0 | 0.0 | 0.0 | 0.0 | 0.0 | 0.0 | 0.0 | 0.0 | 0.0 | 0.0 |
| 022.nt.4 | P101025 | | | | | | | | | | |
| DEX0488_{—} | A_23_{—} | 0.0 | 0.0 | 0.0 | 0.0 | 0.0 | 0.0 | 0.0 | 0.0 | 0.0 | 0.0 |
| 022.nt.4 | P116557 | | | | | | | | | | |
| DEX0488_{—} | A_23_{—} | 0.0 | 0.0 | 0.0 | 0.0 | 0.0 | 0.0 | 0.0 | 0.0 | 0.0 | 0.0 |
| 022.nt.5 | P101025 | | | | | | | | | | |
| DEX0488_{—} | A_23_{—} | 0.0 | 0.0 | 0.0 | 0.0 | 0.0 | 0.0 | 0.0 | 0.0 | 0.0 | 0.0 |
| 022.nt.5 | P116557 | | | | | | | | | | |
| DEX0488_{—} | A_23_{—} | 0.0 | 0.0 | 0.0 | 0.0 | 0.0 | 0.0 | 0.0 | 0.0 | 0.0 | 0.0 |
| 022.nt.6 | P101025 | | | | | | | | | | |
| DEX0488_{—} | A_23_{—} | 0.0 | 0.0 | 0.0 | 0.0 | 0.0 | 0.0 | 0.0 | 0.0 | 0.0 | 0.0 |
| 022.nt.6 | P116557 | | | | | | | | | | |
| DEX0488_{—} | A_23_{—} | 0.0 | 0.0 | 0.0 | 0.0 | 0.0 | 0.0 | 0.0 | 0.0 | 0.0 | 0.0 |
| 022.nt.7 | P101025 | | | | | | | | | | |
| DEX0488_{—} | 8828 | 0.0 | 0.0 | 8.33 | 50.0 | 26.32 | 62.5 | 28.13 | 64.29 | 0.0 | 0.0 |
| 023.nt.1 | | | | | | | | | | | |
| DEX0488_{—} | 8828 | 0.0 | 0.0 | 8.33 | 50.0 | 26.32 | 62.5 | 28.13 | 64.29 | 0.0 | 0.0 |
| 023.nt.2 | | | | | | | | | | | |
| DEX0488_{—} | 14345 | 0.0 | 0.0 | 0.0 | 0.0 | 0.0 | 0.0 | 0.0 | 0.0 | 0.0 | 0.0 |
| 024.nt.1 | | | | | | | | | | | |
| DEX0488_{—} | A_23_{—} | 0.0 | 0.0 | 0.0 | 0.0 | 0.0 | 0.0 | 0.0 | 0.0 | 0.0 | 0.0 |
| 024.nt.1 | P101025 | | | | | | | | | | |
| DEX0488_{—} | A_23_{—} | 0.0 | 0.0 | 0.0 | 0.0 | 0.0 | 0.0 | 0.0 | 0.0 | 0.0 | 0.0 |
| 024.nt.1 | P116557 | | | | | | | | | | |
| DEX0488_{—} | 14345 | 0.0 | 0.0 | 0.0 | 0.0 | 0.0 | 0.0 | 0.0 | 0.0 | 0.0 | 0.0 |
| 024.nt.2 | | | | | | | | | | | |
| DEX0488_{—} | A_23_{—} | 0.0 | 0.0 | 0.0 | 0.0 | 0.0 | 0.0 | 0.0 | 0.0 | 0.0 | 0.0 |
| 024.nt.2 | P101025 | | | | | | | | | | |
| DEX0488_{—} | A_23_{—} | 0.0 | 0.0 | 0.0 | 0.0 | 0.0 | 0.0 | 0.0 | 0.0 | 0.0 | 0.0 |
| 024.nt.2 | P116557 | | | | | | | | | | |
| DEX0488_{—} | A_23_{—} | 0.0 | 0.0 | 0.0 | 0.0 | 0.0 | 0.0 | 0.0 | 0.0 | 0.0 | 0.0 |
| 025.nt.1 | P66543 | | | | | | | | | | |
| DEX0488_{—} | A_23_{—} | 0.0 | 0.0 | 0.0 | 0.0 | 0.0 | 0.0 | 0.0 | 0.0 | 0.0 | 0.0 |
| 026.nt.1 | P164702 | | | | | | | | | | |
| DEX0488_{—} | 17852 | 26.32 | 83.33 | 58.33 | 100.0 | 36.84 | 66.67 | 43.75 | 73.68 | 33.33 | 100.0 |
| 027.nt.1 | | | | | | | | | | | |
| DEX0488_{—} | A_23_{—} | 21.05 | 100.0 | 25.0 | 100.0 | 26.32 | 83.33 | 31.25 | 83.33 | 22.22 | 100.0 |
| 027.nt.1 | P169437 | | | | | | | | | | |
| DEX0488_{—} | 17852 | 26.32 | 83.33 | 58.33 | 100.0 | 36.84 | 66.67 | 43.75 | 73.68 | 33.33 | 100.0 |
| 027.nt.2 | | | | | | | | | | | |
| DEX0488_{—} | A_23_{—} | 21.05 | 100.0 | 25.0 | 100.0 | 26.32 | 83.33 | 31.25 | 83.33 | 22.22 | 100.0 |
| 027.nt.2 | P169437 | | | | | | | | | | |
| DEX0488_{—} | 17852 | 26.32 | 83.33 | 58.33 | 100.0 | 36.84 | 66.67 | 43.75 | 73.68 | 33.33 | 100.0 |
| 027.nt.3 | | | | | | | | | | | |
| DEX0488_{—} | A_23_{—} | 21.05 | 100.0 | 25.0 | 100.0 | 26.32 | 83.33 | 31.25 | 83.33 | 22.22 | 100.0 |
| 027.nt.3 | P169437 | | | | | | | | | | |
| DEX0488_{—} | 17852 | 26.32 | 83.33 | 58.33 | 100.0 | 36.84 | 66.67 | 43.75 | 73.68 | 33.33 | 100.0 |
| 027.nt.4 | | | | | | | | | | | |
| DEX0488_{—} | A_23_{—} | 21.05 | 100.0 | 25.0 | 100.0 | 26.32 | 83.33 | 31.25 | 83.33 | 22.22 | 100.0 |
| 027.nt.4 | P169437 | | | | | | | | | | |
| DEX0488_{—} | 92327 | 0.0 | 0.0 | 0.0 | 0.0 | 0.0 | 0.0 | 0.0 | 0.0 | 0.0 | 0.0 |
| 028.nt.1 | | | | | | | | | | | |
| DEX0488_{—} | A_23_{—} | 0.0 | 0.0 | 0.0 | 0.0 | 0.0 | 0.0 | 0.0 | 0.0 | 0.0 | 0.0 |
| 028.nt.1 | P5211 | | | | | | | | | | |
| DEX0488_{—} | A_23_{—} | 0.0 | 0.0 | 0.0 | 0.0 | 26.32 | 26.32 | 28.13 | 28.13 | 0.0 | 0.0 |
| 029.nt.1 | P158725 | | | | | | | | | | |
| DEX0488_{—} | A_23_{—} | 10.53 | 10.53 | 0.0 | 0.0 | 0.0 | 0.0 | 0.0 | 0.0 | 11.11 | 11.11 |
| 030.nt.1 | P254917 | | | | | | | | | | |
| DEX0488_{—} | 25814 | 0.0 | 0.0 | 0.0 | 0.0 | 0.0 | 0.0 | 0.0 | 0.0 | 0.0 | 0.0 |
| 031.nt.1 | | | | | | | | | | | |
| DEX0488_{—} | A_23_{—} | 5.26 | 5.26 | 0.0 | 0.0 | 5.26 | 5.41 | 6.25 | 6.45 | 0.0 | 0.0 |
| 031.nt.1 | P215944 | | | | | | | | | | |
| DEX0488_{—} | A_23_{—} | 0.0 | 0.0 | 0.0 | 0.0 | 0.0 | 0.0 | 0.0 | 0.0 | 0.0 | 0.0 |
| 033.nt.1 | P85570 | | | | | | | | | | |
| DEX0488_{—} | A_23_{—} | 0.0 | 0.0 | 0.0 | 0.0 | 0.0 | 0.0 | 0.0 | 0.0 | 0.0 | 0.0 |
| 033.nt.2 | P85570 | | | | | | | | | | |
| DEX0488_{—} | A_23_{—} | 0.0 | 0.0 | 0.0 | 0.0 | 0.0 | 0.0 | 0.0 | 0.0 | 0.0 | 0.0 |
| 034.nt.1 | P99386 | | | | | | | | | | |
| DEX0488_{—} | A_23_{—} | 0.0 | 0.0 | 0.0 | 0.0 | 5.26 | 9.52 | 6.25 | 11.11 | 0.0 | 0.0 |
| 035.nt.1 | P30254 | | | | | | | | | | |
| DEX0488_{—} | A_23_{—} | 0.0 | 0.0 | 0.0 | 0.0 | 5.26 | 9.52 | 6.25 | 11.11 | 0.0 | 0.0 |
| 035.nt.2 | P30254 | | | | | | | | | | |
| DEX0488_{—} | A_23_{—} | 0.0 | 0.0 | 0.0 | 0.0 | 2.63 | 10.0 | 0.0 | 0.0 | 0.0 | 0.0 |
| 036.nt.1 | P101992 | | | | | | | | | | |
| DEX0488_{—} | A_23_{—} | 0.0 | 0.0 | 0.0 | 0.0 | 2.63 | 10.0 | 0.0 | 0.0 | 0.0 | 0.0 |
| 036.nt.2 | P101992 | | | | | | | | | | |

[0503] TABLE 12

| | | | | | Cln | | | | Cln | | Cln |
|---|---|---|---|---|---|---|---|---|---|---|---|
| | | | Cln | Cln | Met | | Cln | Cln | Stg | Cln | Stg |
| | | Cln | Chrn | Met | Can | Cln | Stg I | Stg | II | Stg | III |
| | | Chrn | UD1 % | Can | UD1 % | Stg I | UD1 % | II | UD1 % | III | UD1 % |
| | | UD1 | valid | UD1 | valid | UD1 | valid | UD1 | valid | UD1 | valid |
| | Oligo | % up | up | % up | up | % up | up | % up | up | % up | up |
| DEX ID | Name | n = 10 | n = 10 | n = 7 | n = 7 | n = 9 | n = 9 | n = 11 | n = 11 | n = 12 | n = 12 |
| DEX0488_{—} | A_23_P40174 | 70.0 | 70.0 | 42.86 | 42.86 | 22.22 | 22.22 | 27.27 | 27.27 | 16.67 | 16.67 |
| 001.nt.1 | | | | | | | | | | | |
| DEX0488_{—} | A_23_P40174 | 70.0 | 70.0 | 42.86 | 42.86 | 22.22 | 22.22 | 27.27 | 27.27 | 16.67 | 16.67 |
| 001.nt.10 | | | | | | | | | | | |
| DEX0488_{—} | A_23_P40174 | 70.0 | 70.0 | 42.86 | 42.86 | 22.22 | 22.22 | 27.27 | 27.27 | 16.67 | 16.67 |
| 001.nt.11 | | | | | | | | | | | |
| DEX0488_{—} | A_23_P40174 | 70.0 | 70.0 | 42.86 | 42.86 | 22.22 | 22.22 | 27.27 | 27.27 | 16.67 | 16.67 |
| 001.nt.2 | | | | | | | | | | | |
| DEX0488_{—} | A_23_P40174 | 70.0 | 70.0 | 42.86 | 42.86 | 22.22 | 22.22 | 27.27 | 27.27 | 16.67 | 16.67 |
| 001.nt.3 | | | | | | | | | | | |
| DEX0488_{—} | A_23_P40174 | 70.0 | 70.0 | 42.86 | 42.86 | 22.22 | 22.22 | 27.27 | 27.27 | 16.67 | 16.67 |
| 001.nt.4 | | | | | | | | | | | |
| DEX0488_{—} | A_23_P40174 | 70.0 | 70.0 | 42.86 | 42.86 | 22.22 | 22.22 | 27.27 | 27.27 | 16.67 | 16.67 |
| 001.nt.5 | | | | | | | | | | | |
| DEX0488_{—} | A_23_P40174 | 70.0 | 70.0 | 42.86 | 42.86 | 22.22 | 22.22 | 27.27 | 27.27 | 16.67 | 16.67 |
| 001.nt.6 | | | | | | | | | | | |
| DEX0488_{—} | A_23_P40174 | 70.0 | 70.0 | 42.86 | 42.86 | 22.22 | 22.22 | 27.27 | 27.27 | 16.67 | 16.67 |
| 001.nt.7 | | | | | | | | | | | |
| DEX0488_{—} | A_23_P40174 | 70.0 | 70.0 | 42.86 | 42.86 | 22.22 | 22.22 | 27.27 | 27.27 | 16.67 | 16.67 |
| 001.nt.8 | | | | | | | | | | | |
| DEX0488_{—} | A_23_P40174 | 70.0 | 70.0 | 42.86 | 42.86 | 22.22 | 22.22 | 27.27 | 27.27 | 16.67 | 16.67 |
| 001.nt.9 | | | | | | | | | | | |
| DEX0488_{—} | A_23_P48886 | 0.0 | 0.0 | 0.0 | 0.0 | 11.11 | 100.0 | 0.0 | 0.0 | 0.0 | 0.0 |
| 002.nt.1 | | | | | | | | | | | |
| DEX0488_{—} | A_23_P121533 | 10.0 | 10.0 | 0.0 | 0.0 | 0.0 | 0.0 | 18.18 | 18.18 | 0.0 | 0.0 |
| 003.nt.1 | | | | | | | | | | | |
| DEX0488_{—} | A_23_P121533 | 10.0 | 10.0 | 0.0 | 0.0 | 0.0 | 0.0 | 18.18 | 18.18 | 0.0 | 0.0 |
| 003.nt.2 | | | | | | | | | | | |
| DEX0488_{—} | A_23_P121533 | 10.0 | 10.0 | 0.0 | 0.0 | 0.0 | 0.0 | 18.18 | 18.18 | 0.0 | 0.0 |
| 003.nt.3 | | | | | | | | | | | |
| DEX0488_{—} | A_23_P121533 | 10.0 | 10.0 | 0.0 | 0.0 | 0.0 | 0.0 | 18.18 | 18.18 | 0.0 | 0.0 |
| 003.nt.4 | | | | | | | | | | | |
| DEX0488_{—} | A_23_P121533 | 10.0 | 10.0 | 0.0 | 0.0 | 0.0 | 0.0 | 18.18 | 18.18 | 0.0 | 0.0 |
| 003.nt.5 | | | | | | | | | | | |
| DEX0488_{—} | A_23_P121533 | 10.0 | 10.0 | 0.0 | 0.0 | 0.0 | 0.0 | 18.18 | 18.18 | 0.0 | 0.0 |
| 003.nt.6 | | | | | | | | | | | |
| DEX0488_{—} | A_23_P121533 | 10.0 | 10.0 | 0.0 | 0.0 | 0.0 | 0.0 | 18.18 | 18.18 | 0.0 | 0.0 |
| 003.nt.7 | | | | | | | | | | | |
| DEX0488_{—} | 10666 | 0.0 | 0.0 | 14.29 | 50.0 | 22.22 | 40.0 | 0.0 | 0.0 | 0.0 | 0.0 |
| 004.nt.1 | | | | | | | | | | | |
| DEX0488_{—} | A_23_P123276 | 0.0 | 0.0 | 0.0 | 0.0 | 0.0 | 0.0 | 0.0 | 0.0 | 0.0 | 0.0 |
| 005.nt.1 | | | | | | | | | | | |
| DEX0488_{—} | A_23_P218128 | 90.0 | 90.0 | 0.0 | 0.0 | 33.33 | 37.5 | 36.36 | 44.44 | 8.33 | 11.11 |
| 006.nt.1 | | | | | | | | | | | |
| DEX0488_{—} | A_23_P257296 | 40.0 | 40.0 | 42.86 | 42.86 | 22.22 | 22.22 | 27.27 | 27.27 | 50.0 | 50.0 |
| 008.nt.1 | | | | | | | | | | | |
| DEX0488_{—} | A_23_P257296 | 40.0 | 40.0 | 42.86 | 42.86 | 22.22 | 22.22 | 27.27 | 27.27 | 50.0 | 50.0 |
| 008.nt.2 | | | | | | | | | | | |
| DEX0488_{—} | A_23_P84596 | 20.0 | 20.0 | 0.0 | 0.0 | 0.0 | 0.0 | 0.0 | 0.0 | 0.0 | 0.0 |
| 009.nt.1 | | | | | | | | | | | |
| DEX0488_{—} | A_23_P9571 | 0.0 | 0.0 | 0.0 | 0.0 | 0.0 | 0.0 | 0.0 | 0.0 | 0.0 | 0.0 |
| 011.nt.1 | | | | | | | | | | | |
| DEX0488_{—} | A_23_P64828 | 0.0 | 0.0 | 0.0 | 0.0 | 0.0 | 0.0 | 0.0 | 0.0 | 0.0 | 0.0 |
| 012.nt.1 | | | | | | | | | | | |
| DEX0488_{—} | A_23_P118174 | 0.0 | 0.0 | 0.0 | 0.0 | 0.0 | 0.0 | 0.0 | 0.0 | 0.0 | 0.0 |
| 013.nt.1 | | | | | | | | | | | |
| DEX0488_{—} | A_23_P118174 | 0.0 | 0.0 | 0.0 | 0.0 | 0.0 | 0.0 | 0.0 | 0.0 | 0.0 | 0.0 |
| 013.nt.2 | | | | | | | | | | | |
| DEX0488_{—} | A_23_P114783 | 0.0 | 0.0 | 0.0 | 0.0 | 11.11 | 11.11 | 18.18 | 18.18 | 0.0 | 0.0 |
| 014.nt.1 | | | | | | | | | | | |
| DEX0488_{—} | A_23_P114783 | 0.0 | 0.0 | 0.0 | 0.0 | 11.11 | 11.11 | 18.18 | 18.18 | 0.0 | 0.0 |
| 014.nt.2 | | | | | | | | | | | |
| DEX0488_{—} | A_23_P114783 | 0.0 | 0.0 | 0.0 | 0.0 | 11.11 | 11.11 | 18.18 | 18.18 | 0.0 | 0.0 |
| 014.nt.3 | | | | | | | | | | | |
| DEX0488_{—} | A_23_P114783 | 0.0 | 0.0 | 0.0 | 0.0 | 11.11 | 11.11 | 18.18 | 18.18 | 0.0 | 0.0 |
| 014.nt.4 | | | | | | | | | | | |
| DEX0488_{—} | A_23_P167005 | 0.0 | 0.0 | 28.57 | 33.33 | 11.11 | 11.11 | 9.09 | 9.09 | 16.67 | 16.67 |
| 015.nt.1 | | | | | | | | | | | |
| DEX0488_{—} | A_23_P167005 | 0.0 | 0.0 | 28.57 | 33.33 | 11.11 | 11.11 | 9.09 | 9.09 | 16.67 | 16.67 |
| 015.nt.2 | | | | | | | | | | | |
| DEX0488_{—} | A_23_P120974 | 0.0 | 0.0 | 0.0 | 0.0 | 0.0 | 0.0 | 0.0 | 0.0 | 0.0 | 0.0 |
| 016.nt.8 | | | | | | | | | | | |
| DEX0488_{—} | A_23_P206632 | 0.0 | 0.0 | 0.0 | 0.0 | 11.11 | 50.0 | 0.0 | 0.0 | 0.0 | 0.0 |
| 018.nt.1 | | | | | | | | | | | |
| DEX0488_{—} | A_23_P22052 | 0.0 | 0.0 | 0.0 | 0.0 | 0.0 | 0.0 | 0.0 | 0.0 | 0.0 | 0.0 |
| 018.nt.1 | | | | | | | | | | | |
| DEX0488_{—} | A_23_P206632 | 0.0 | 0.0 | 0.0 | 0.0 | 11.11 | 50.0 | 0.0 | 0.0 | 0.0 | 0.0 |
| 018.nt.2 | | | | | | | | | | | |
| DEX0488_{—} | A_23_P22052 | 0.0 | 0.0 | 0.0 | 0.0 | 0.0 | 0.0 | 0.0 | 0.0 | 0.0 | 0.0 |
| 018.nt.2 | | | | | | | | | | | |
| DEX0488_{—} | A_23_P206632 | 0.0 | 0.0 | 0.0 | 0.0 | 11.11 | 50.0 | 0.0 | 0.0 | 0.0 | 0.0 |
| 018.nt.3 | | | | | | | | | | | |
| DEX0488_{—} | A_23_P22052 | 0.0 | 0.0 | 0.0 | 0.0 | 0.0 | 0.0 | 0.0 | 0.0 | 0.0 | 0.0 |
| 018.nt.3 | | | | | | | | | | | |
| DEX0488_{—} | A_23_P206632 | 0.0 | 0.0 | 0.0 | 0.0 | 11.11 | 50.0 | 0.0 | 0.0 | 0.0 | 0.0 |
| 018.nt.4 | | | | | | | | | | | |
| DEX0488_{—} | A_23_P22052 | 0.0 | 0.0 | 0.0 | 0.0 | 0.0 | 0.0 | 0.0 | 0.0 | 0.0 | 0.0 |
| 018.nt.4 | | | | | | | | | | | |
| DEX0488_{—} | A_23_P206632 | 0.0 | 0.0 | 0.0 | 0.0 | 11.11 | 50.0 | 0.0 | 0.0 | 0.0 | 0.0 |
| 018.nt.5 | | | | | | | | | | | |
| DEX0488_{—} | A_23_P22052 | 0.0 | 0.0 | 0.0 | 0.0 | 0.0 | 0.0 | 0.0 | 0.0 | 0.0 | 0.0 |
| 018.nt.5 | | | | | | | | | | | |
| DEX0488_{—} | A_23_P206632 | 0.0 | 0.0 | 0.0 | 0.0 | 11.11 | 50.0 | 0.0 | 0.0 | 0.0 | 0.0 |
| 018.nt.6 | | | | | | | | | | | |
| DEX0488_{—} | A_23_P22052 | 0.0 | 0.0 | 0.0 | 0.0 | 0.0 | 0.0 | 0.0 | 0.0 | 0.0 | 0.0 |
| 018.nt.6 | | | | | | | | | | | |
| DEX0488_{—} | A_23_P206632 | 0.0 | 0.0 | 0.0 | 0.0 | 11.11 | 50.0 | 0.0 | 0.0 | 0.0 | 0.0 |
| 018.nt.7 | | | | | | | | | | | |
| DEX0488_{—} | A_23_P22052 | 0.0 | 0.0 | 0.0 | 0.0 | 0.0 | 0.0 | 0.0 | 0.0 | 0.0 | 0.0 |
| 018.nt.7 | | | | | | | | | | | |
| DEX0488_{—} | A_23_P206632 | 0.0 | 0.0 | 0.0 | 0.0 | 11.11 | 50.0 | 0.0 | 0.0 | 0.0 | 0.0 |
| 018.nt.8 | | | | | | | | | | | |
| DEX0488_{—} | A_23_P22052 | 0.0 | 0.0 | 0.0 | 0.0 | 0.0 | 0.0 | 0.0 | 0.0 | 0.0 | 0.0 |
| 018.nt.8 | | | | | | | | | | | |
| DEX0488_{—} | A_23_P118174 | 0.0 | 0.0 | 0.0 | 0.0 | 0.0 | 0.0 | 0.0 | 0.0 | 0.0 | 0.0 |
| 019.nt.3 | | | | | | | | | | | |
| DEX0488_{—} | A_23_P118174 | 0.0 | 0.0 | 0.0 | 0.0 | 0.0 | 0.0 | 0.0 | 0.0 | 0.0 | 0.0 |
| 019.nt.6 | | | | | | | | | | | |
| DEX0488_{—} | A_23_P118174 | 0.0 | 0.0 | 0.0 | 0.0 | 0.0 | 0.0 | 0.0 | 0.0 | 0.0 | 0.0 |
| 019.nt.8 | | | | | | | | | | | |
| DEX0488_{—} | 77771 | 0.0 | 0.0 | 0.0 | 0.0 | 0.0 | 0.0 | 0.0 | 0.0 | 0.0 | 0.0 |
| 020.nt.1 | | | | | | | | | | | |
| DEX0488_{—} | A_23_P101025 | 0.0 | 0.0 | 0.0 | 0.0 | 0.0 | 0.0 | 0.0 | 0.0 | 0.0 | 0.0 |
| 022.nt.2 | | | | | | | | | | | |
| DEX0488_{—} | A_23_P116557 | 0.0 | 0.0 | 0.0 | 0.0 | 0.0 | 0.0 | 0.0 | 0.0 | 0.0 | 0.0 |
| 022.nt.2 | | | | | | | | | | | |
| DEX0488_{—} | A_23_P101025 | 0.0 | 0.0 | 0.0 | 0.0 | 0.0 | 0.0 | 0.0 | 0.0 | 0.0 | 0.0 |
| 022.nt.3 | | | | | | | | | | | |
| DEX0488_{—} | A_23_P116557 | 0.0 | 0.0 | 0.0 | 0.0 | 0.0 | 0.0 | 0.0 | 0.0 | 0.0 | 0.0 |
| 022.nt.3 | | | | | | | | | | | |
| DEX0488_{—} | A_23_P101025 | 0.0 | 0.0 | 0.0 | 0.0 | 0.0 | 0.0 | 0.0 | 0.0 | 0.0 | 0.0 |
| 022.nt.4 | | | | | | | | | | | |
| DEX0488_{—} | A_23_P116557 | 0.0 | 0.0 | 0.0 | 0.0 | 0.0 | 0.0 | 0.0 | 0.0 | 0.0 | 0.0 |
| 022.nt.4 | | | | | | | | | | | |
| DEX0488_{—} | A_23_P101025 | 0.0 | 0.0 | 0.0 | 0.0 | 0.0 | 0.0 | 0.0 | 0.0 | 0.0 | 0.0 |
| 022.nt.5 | | | | | | | | | | | |
| DEX0488_{—} | A_23_P116557 | 0.0 | 0.0 | 0.0 | 0.0 | 0.0 | 0.0 | 0.0 | 0.0 | 0.0 | 0.0 |
| 022.nt.5 | | | | | | | | | | | |
| DEX0488_{—} | A_23_P101025 | 0.0 | 0.0 | 0.0 | 0.0 | 0.0 | 0.0 | 0.0 | 0.0 | 0.0 | 0.0 |
| 022.nt.6 | | | | | | | | | | | |
| DEX0488_{—} | A_23_P116557 | 0.0 | 0.0 | 0.0 | 0.0 | 0.0 | 0.0 | 0.0 | 0.0 | 0.0 | 0.0 |
| 022.nt.6 | | | | | | | | | | | |
| DEX0488_{—} | A_23_P101025 | 0.0 | 0.0 | 0.0 | 0.0 | 0.0 | 0.0 | 0.0 | 0.0 | 0.0 | 0.0 |
| 022.nt.7 | | | | | | | | | | | |
| DEX0488_{—} | 8828 | 0.0 | 0.0 | 14.29 | 33.33 | 33.33 | 60.0 | 45.45 | 83.33 | 8.33 | 33.33 |
| 023.nt.1 | | | | | | | | | | | |
| DEX0488_{—} | 8828 | 0.0 | 0.0 | 14.29 | 33.33 | 33.33 | 60.0 | 45.45 | 83.33 | 8.33 | 33.33 |
| 023.nt.2 | | | | | | | | | | | |
| DEX0488_{—} | 14345 | 0.0 | 0.0 | 0.0 | 0.0 | 0.0 | 0.0 | 0.0 | 0.0 | 0.0 | 0.0 |
| 024.nt.1 | | | | | | | | | | | |
| DEX0488_{—} | A_23_P101025 | 0.0 | 0.0 | 0.0 | 0.0 | 0.0 | 0.0 | 0.0 | 0.0 | 0.0 | 0.0 |
| 024.nt.1 | | | | | | | | | | | |
| DEX0488_{—} | A_23_P116557 | 0.0 | 0.0 | 0.0 | 0.0 | 0.0 | 0.0 | 0.0 | 0.0 | 0.0 | 0.0 |
| 024.nt.1 | | | | | | | | | | | |
| DEX0488_{—} | 14345 | 0.0 | 0.0 | 0.0 | 0.0 | 0.0 | 0.0 | 0.0 | 0.0 | 0.0 | 0.0 |
| 024.nt.2 | | | | | | | | | | | |
| DEX0488_{—} | A_23_P101025 | 0.0 | 0.0 | 0.0 | 0.0 | 0.0 | 0.0 | 0.0 | 0.0 | 0.0 | 0.0 |
| 024.nt.2 | | | | | | | | | | | |
| DEX0488_{—} | A_23_P116557 | 0.0 | 0.0 | 0.0 | 0.0 | 0.0 | 0.0 | 0.0 | 0.0 | 0.0 | 0.0 |
| 024.nt.2 | | | | | | | | | | | |
| DEX0488_{—} | A_23_P66543 | 0.0 | 0.0 | 0.0 | 0.0 | 0.0 | 0.0 | 0.0 | 0.0 | 0.0 | 0.0 |
| 025.nt.1 | | | | | | | | | | | |
| DEX0488_{—} | A_23_P164702 | 0.0 | 0.0 | 0.0 | 0.0 | 0.0 | 0.0 | 0.0 | 0.0 | 0.0 | 0.0 |
| 026.nt.1 | | | | | | | | | | | |
| DEX0488_{—} | 17852 | 20.0 | 66.67 | 0.0 | 0.0 | 66.67 | 100.0 | 27.27 | 42.86 | 41.67 | 83.33 |
| 027.nt.1 | | | | | | | | | | | |
| DEX0488_{—} | A_23_P169437 | 20.0 | 100.0 | 0.0 | 0.0 | 44.44 | 100.0 | 36.36 | 66.67 | 16.67 | 100.0 |
| 027.nt.1 | | | | | | | | | | | |
| DEX0488_{—} | 17852 | 20.0 | 66.67 | 0.0 | 0.0 | 66.67 | 100.0 | 27.27 | 42.86 | 41.67 | 83.33 |
| 027.nt.2 | | | | | | | | | | | |
| DEX0488_{—} | A_23_P169437 | 20.0 | 100.0 | 0.0 | 0.0 | 44.44 | 100.0 | 36.36 | 66.67 | 16.67 | 100.0 |
| 027.nt.2 | | | | | | | | | | | |
| DEX0488_{—} | 17852 | 20.0 | 66.67 | 0.0 | 0.0 | 66.67 | 100.0 | 27.27 | 42.86 | 41.67 | 83.33 |
| 027.nt.3 | | | | | | | | | | | |
| DEX0488_{—} | A_23_P169437 | 20.0 | 100.0 | 0.0 | 0.0 | 44.44 | 100.0 | 36.36 | 66.67 | 16.67 | 100.0 |
| 027.nt.3 | | | | | | | | | | | |
| DEX0488_{—} | 17852 | 20.0 | 66.67 | 0.0 | 0.0 | 66.67 | 100.0 | 27.27 | 42.86 | 41.67 | 83.33 |
| 027.nt.4 | | | | | | | | | | | |
| DEX0488_{—} | A_23_P169437 | 20.0 | 100.0 | 0.0 | 0.0 | 44.44 | 100.0 | 36.36 | 66.67 | 16.67 | 100.0 |
| 027.nt.4 | | | | | | | | | | | |
| DEX0488_{—} | 92327 | 0.0 | 0.0 | 0.0 | 0.0 | 0.0 | 0.0 | 0.0 | 0.0 | 0.0 | 0.0 |
| 028.nt.1 | | | | | | | | | | | |
| DEX0488_{—} | A_23_P5211 | 0.0 | 0.0 | 0.0 | 0.0 | 0.0 | 0.0 | 0.0 | 0.0 | 0.0 | 0.0 |
| 028.nt.1 | | | | | | | | | | | |
| DEX0488_{—} | A_23_P158725 | 0.0 | 0.0 | 14.29 | 14.29 | 55.56 | 55.56 | 36.36 | 36.36 | 0.0 | 0.0 |
| 029.nt.1 | | | | | | | | | | | |
| DEX0488_{—} | A_23_P254917 | 10.0 | 10.0 | 0.0 | 0.0 | 0.0 | 0.0 | 0.0 | 0.0 | 0.0 | 0.0 |
| 030.nt.1 | | | | | | | | | | | |
| DEX0488_{—} | 25814 | 0.0 | 0.0 | 0.0 | 0.0 | 0.0 | 0.0 | 0.0 | 0.0 | 0.0 | 0.0 |
| 031.nt.1 | | | | | | | | | | | |
| DEX0488_{—} | A_23_P215944 | 10.0 | 10.0 | 0.0 | 0.0 | 11.11 | 11.11 | 9.09 | 9.09 | 0.0 | 0.0 |
| 031.nt.1 | | | | | | | | | | | |
| DEX0488_{—} | A_23_P85570 | 0.0 | 0.0 | 0.0 | 0.0 | 0.0 | 0.0 | 0.0 | 0.0 | 0.0 | 0.0 |
| 033.nt.1 | | | | | | | | | | | |
| DEX0488_{—} | A_23_P85570 | 0.0 | 0.0 | 0.0 | 0.0 | 0.0 | 0.0 | 0.0 | 0.0 | 0.0 | 0.0 |
| 033.nt.2 | | | | | | | | | | | |
| DEX0488_{—} | A_23_P99386 | 0.0 | 0.0 | 0.0 | 0.0 | 0.0 | 0.0 | 0.0 | 0.0 | 0.0 | 0.0 |
| 034.nt.1 | | | | | | | | | | | |
| DEX0488_{—} | A_23_P30254 | 0.0 | 0.0 | 0.0 | 0.0 | 11.11 | 12.5 | 9.09 | 16.67 | 0.0 | 0.0 |
| 035.nt.1 | | | | | | | | | | | |
| DEX0488_{—} | A_23_P30254 | 0.0 | 0.0 | 0.0 | 0.0 | 11.11 | 12.5 | 9.09 | 16.67 | 0.0 | 0.0 |
| 035.nt.2 | | | | | | | | | | | |
| DEX0488_{—} | A_23_P101992 | 0.0 | 0.0 | 14.29 | 33.33 | 0.0 | 0.0 | 0.0 | 0.0 | 0.0 | 0.0 |
| 036.nt.1 | | | | | | | | | | | |
| DEX0488_{—} | A_23_P101992 | 0.0 | 0.0 | 14.29 | 33.33 | 0.0 | 0.0 | 0.0 | 0.0 | 0.0 | 0.0 |
| 036.nt.2 | | | | | | | | | | | |

[0504] Breast Cancer Chips

[0505] For breast cancer two different chip designs were evaluated with overlapping sets of a total of 36 samples, comparing the expression patterns of breast cancer derived polyA+ RNA to polyA+ RNA isolated from a pool of 10 normal breast tissues. For the Breast Array Chip, all 36 samples (9 stage I cancers, 23 stage II cancers, 4 stage III cancers) were analyzed. These samples also represented 10 Grade1/2 and 26 Grade 3 cancers. The histopathologic grades for cancer are classified as follows: GX, cannot be assessed; G1, well differentiated; G2, moderately differentiated; G3, poorly differentiated; and G4, undifferentiated. AJCC Cancer Staging Handbook, pp. 9, (5th Ed, 1998). Samples were further grouped based on the expression patterns of the known breast cancer associated genes Her2 and ERα (10 HER2 up, 26 HER2 not up, 20 ER up and 16 ER not up). For the Multi-Cancer Array Chip, a subset of 20 of these samples (9 stage I cancers, 8 stage II cancers, 3 stage III cancers) were assessed. In addition to tissue samples, six lung cancer cell lines (DU4475, MCF7, MDAMB23 1, MDAMB36 1, MDAMB453, T47D) were analyzed on the Breast Array Chip.

[0506] The results for the statistically significant up-regulated genes on the Breast Array Chip are shown in Table(s) 13-16. The results for the statistically significant up-regulated genes on the Multi-Cancer Array Chip are shown in Table(s) 17-18. The first two columns of each table contain information about the sequence itself (Seq ID, Oligo Name), the next columns show the results obtained for all (“ALL”) breast cancer samples, cancers corresponding to stage I (“ST1”), stages II and III (“ST2,3”), grades 1 and 2 (“GR1, 2”), grade 3 (“GR3”), cancers exhibiting up-regulation of Her2 (“HER2up”) or ERα (“ERup”) or those not exhibiting up-regulation of Her2 (“NOT HER2up”) or ERα (“NOT ERup”). ‘% up’ indicates the percentage of all experiments in which up-regulation of at least 2-fold was observed (n=36 for Breast Array Chip, n=20 for the Multi-Cancer Array Chip), ‘% valid up’ indicates the percentage of experiments with valid expression values in which up-regulation of at least 2-fold was observed. For the cell lines, ‘% up’ indicates the percentage of all experiments in which up-regulation of at least 1.8-fold was observed (n=6 for Breast Array Chip), ‘% valid up’ indicates the percentage of experiments with valid expression values in which up-regulation of at least 1.8-fold was observed.

TABLE 13

| | | | Mam | | Mam | | Mam | | Mam | | Mam |
|---|---|---|---|---|---|---|---|---|---|---|---|
| | | Mam | ALL % | Mam | ST1 % | Mam | ST2, 3 % | Mam | GR1, 2 % | Mam | GR3 % |
| | | ALL | valid | ST1 | valid | ST2, 3 | valid | GR1, 2 | valid | GR3 | valid |
| | Oligo | % up | up | % up | up | % up | up | % up | up | % up | up |
| DEX ID | Name | n = 36 | n = 36 | n = 9 | n = 9 | n = 27 | n = 27 | n = 10 | n = 10 | n = 26 | n = 26 |
| DEX0488_{—} | 17244 | 16.7 | 17.1 | 22.2 | 22.2 | 14.8 | 15.4 | 40.0 | 44.4 | 7.7 | 7.7 |
| 008.nt.1 | | | | | | | | | | | |
| DEX0488_{—} | 17292 | 19.4 | 19.4 | 22.2 | 22.2 | 18.5 | 18.5 | 50.0 | 50.0 | 7.7 | 7.7 |
| 008.nt.1 | | | | | | | | | | | |
| DEX0488_{—} | 20399 | 19.4 | 20.0 | 22.2 | 25.0 | 18.5 | 18.5 | 50.0 | 50.0 | 7.7 | 8.0 |
| 008.nt.1 | | | | | | | | | | | |
| DEX0488_{—} | 17244 | 16.7 | 17.1 | 22.2 | 22.2 | 14.8 | 15.4 | 40.0 | 44.4 | 7.7 | 7.7 |
| 008.nt.2 | | | | | | | | | | | |
| DEX0488_{—} | 17292 | 19.4 | 19.4 | 22.2 | 22.2 | 18.5 | 18.5 | 50.0 | 50.0 | 7.7 | 7.7 |
| 008.nt.2 | | | | | | | | | | | |
| DEX0488_{—} | 20399 | 19.4 | 20.0 | 22.2 | 25.0 | 18.5 | 18.5 | 50.0 | 50.0 | 7.7 | 8.0 |
| 008.nt.2 | | | | | | | | | | | |
| DEX0488_{—} | 26770 | 52.8 | 55.9 | 55.6 | 71.4 | 51.9 | 51.9 | 90.0 | 90.0 | 38.5 | 41.7 |
| 010.nt.1 | | | | | | | | | | | |
| DEX0488_{—} | 39927 | 75.0 | 79.4 | 77.8 | 77.8 | 74.1 | 80.0 | 70.0 | 70.0 | 76.9 | 83.3 |
| 011.nt.1 | | | | | | | | | | | |
| DEX0488_{—} | 39927.2 | 83.3 | 83.3 | 77.8 | 77.8 | 85.2 | 85.2 | 80.0 | 80.0 | 84.6 | 84.6 |
| 011.nt.1 | | | | | | | | | | | |
| DEX0488_{—} | 39928 | 55.6 | 58.8 | 66.7 | 66.7 | 51.9 | 56.0 | 50.0 | 50.0 | 57.7 | 62.5 |
| 011.nt.1 | | | | | | | | | | | |
| DEX0488_{—} | 39928.2 | 69.4 | 71.4 | 77.8 | 77.8 | 66.7 | 69.2 | 60.0 | 60.0 | 73.1 | 76.0 |
| 011.nt.1 | | | | | | | | | | | |
| DEX0488_{—} | 21187 | 38.9 | 40.0 | 88.9 | 88.9 | 22.2 | 23.1 | 50.0 | 50.0 | 34.6 | 36.0 |
| 012.nt.1 | | | | | | | | | | | |
| DEX0488_{—} | 21187.2 | 41.7 | 42.9 | 88.9 | 88.9 | 25.9 | 26.9 | 50.0 | 50.0 | 38.5 | 40.0 |
| 012.nt.1 | | | | | | | | | | | |
| DEX0488_{—} | 21188 | 22.2 | 26.7 | 44.4 | 50.0 | 14.8 | 18.2 | 20.0 | 22.2 | 23.1 | 28.6 |
| 012.nt.1 | | | | | | | | | | | |
| DEX0488_{—} | 21188.2 | 22.2 | 22.9 | 44.4 | 44.4 | 14.8 | 15.4 | 20.0 | 20.0 | 23.1 | 24.0 |
| 012.nt.1 | | | | | | | | | | | |
| DEX0488_{—} | 21187 | 38.9 | 40.0 | 88.9 | 88.9 | 22.2 | 23.1 | 50.0 | 50.0 | 34.6 | 36.0 |
| 021.nt.1 | | | | | | | | | | | |
| DEX0488_{—} | 21187.2 | 41.7 | 42.9 | 88.9 | 88.9 | 25.9 | 26.9 | 50.0 | 50.0 | 38.5 | 40.0 |
| 021.nt.1 | | | | | | | | | | | |
| DEX0488_{—} | 21187 | 38.9 | 40.0 | 88.9 | 88.9 | 22.2 | 23.1 | 50.0 | 50.0 | 34.6 | 36.0 |
| 021.nt.2 | | | | | | | | | | | |
| DEX0488_{—} | 21187.2 | 41.7 | 42.9 | 88.9 | 88.9 | 25.9 | 26.9 | 50.0 | 50.0 | 38.5 | 40.0 |
| 021.nt.2 | | | | | | | | | | | |
| DEX0488_{—} | 8828 | 19.4 | 19.4 | 0.0 | 0.0 | 25.9 | 25.9 | 0.0 | 0.0 | 26.9 | 26.9 |
| 023.nt.1 | | | | | | | | | | | |
| DEX0488_{—} | 8828 | 19.4 | 19.4 | 0.0 | 0.0 | 25.9 | 25.9 | 0.0 | 0.0 | 26.9 | 26.9 |
| 023.nt.2 | | | | | | | | | | | |
| DEX0488_{—} | 24160 | 8.3 | 16.7 | 0.0 | 0.0 | 11.1 | 20.0 | 0.0 | 0.0 | 11.5 | 25.0 |
| 026.nt.1 | | | | | | | | | | | |
| DEX0488_{—} | 24160.2 | 8.3 | 16.7 | 0.0 | 0.0 | 11.1 | 20.0 | 0.0 | 0.0 | 11.5 | 27.3 |
| 026.nt.1 | | | | | | | | | | | |
| DEX0488_{—} | 15783 | 13.9 | 13.9 | 22.2 | 22.2 | 11.1 | 11.1 | 0.0 | 0.0 | 19.2 | 19.2 |
| 027.nt.1 | | | | | | | | | | | |
| DEX0488_{—} | 18644 | 13.9 | 20.8 | 22.2 | 40.0 | 11.1 | 15.8 | 0.0 | 0.0 | 19.2 | 29.4 |
| 027.nt.1 | | | | | | | | | | | |
| DEX0488_{—} | 18644.2 | 13.9 | 20.0 | 22.2 | 33.3 | 11.1 | 15.8 | 0.0 | 0.0 | 19.2 | 27.8 |
| 027.nt.1 | | | | | | | | | | | |
| DEX0488_{—} | 18645 | 13.9 | 22.7 | 22.2 | 50.0 | 11.1 | 16.7 | 0.0 | 0.0 | 19.2 | 31.2 |
| 027.nt.1 | | | | | | | | | | | |
| DEX0488_{—} | 18645.2 | 13.9 | 20.8 | 22.2 | 40.0 | 11.1 | 15.8 | 0.0 | 0.0 | 19.2 | 29.4 |
| 027.nt.1 | | | | | | | | | | | |
| DEX0488_{—} | 15783 | 13.9 | 13.9 | 22.2 | 22.2 | 11.1 | 11.1 | 0.0 | 0.0 | 19.2 | 19.2 |
| 027.nt.2 | | | | | | | | | | | |
| DEX0488_{—} | 18644 | 13.9 | 20.8 | 22.2 | 40.0 | 11.1 | 15.8 | 0.0 | 0.0 | 19.2 | 29.4 |
| 027.nt.2 | | | | | | | | | | | |
| DEX0488_{—} | 18644.2 | 13.9 | 20.0 | 22.2 | 33.3 | 11.1 | 15.8 | 0.0 | 0.0 | 19.2 | 27.8 |
| 027.nt.2 | | | | | | | | | | | |
| DEX0488_{—} | 18645 | 13.9 | 22.7 | 22.2 | 50.0 | 11.1 | 16.7 | 0.0 | 0.0 | 19.2 | 31.2 |
| 027.nt.2 | | | | | | | | | | | |
| DEX0488_{—} | 18645.2 | 13.9 | 20.8 | 22.2 | 40.0 | 11.1 | 15.8 | 0.0 | 0.0 | 19.2 | 29.4 |
| 027.nt.2 | | | | | | | | | | | |
| DEX0488_{—} | 15783 | 13.9 | 13.9 | 22.2 | 22.2 | 11.1 | 11.1 | 0.0 | 0.0 | 19.2 | 19.2 |
| 027.nt.3 | | | | | | | | | | | |
| DEX0488_{—} | 18644 | 13.9 | 20.8 | 22.2 | 40.0 | 11.1 | 15.8 | 0.0 | 0.0 | 19.2 | 29.4 |
| 027.nt.3 | | | | | | | | | | | |
| DEX0488_{—} | 18644.2 | 13.9 | 20.0 | 22.2 | 33.3 | 11.1 | 15.8 | 0.0 | 0.0 | 19.2 | 27.8 |
| 027.nt.3 | | | | | | | | | | | |
| DEX0488_{—} | 18645 | 13.9 | 22.7 | 22.2 | 50.0 | 11.1 | 16.7 | 0.0 | 0.0 | 19.2 | 31.2 |
| 027.nt.3 | | | | | | | | | | | |
| DEX0488_{—} | 18645.2 | 13.9 | 20.8 | 22.2 | 40.0 | 11.1 | 15.8 | 0.0 | 0.0 | 19.2 | 29.4 |
| 027.nt.3 | | | | | | | | | | | |
| DEX0488_{—} | 15783 | 13.9 | 13.9 | 22.2 | 22.2 | 11.1 | 11.1 | 0.0 | 0.0 | 19.2 | 19.2 |
| 027.nt.4 | | | | | | | | | | | |
| DEX0488_{—} | 18644 | 13.9 | 20.8 | 22.2 | 40.0 | 11.1 | 15.8 | 0.0 | 0.0 | 19.2 | 29.4 |
| 027.nt.4 | | | | | | | | | | | |
| DEX0488_{—} | 18644.2 | 13.9 | 20.0 | 22.2 | 33.3 | 11.1 | 15.8 | 0.0 | 0.0 | 19.2 | 27.8 |
| 027.nt.4 | | | | | | | | | | | |
| DEX0488_{—} | 18645 | 13.9 | 22.7 | 22.2 | 50.0 | 11.1 | 16.7 | 0.0 | 0.0 | 19.2 | 31.2 |
| 027.nt.4 | | | | | | | | | | | |
| DEX0488_{—} | 18645.2 | 13.9 | 20.8 | 22.2 | 40.0 | 11.1 | 15.8 | 0.0 | 0.0 | 19.2 | 29.4 |
| 027.nt.4 | | | | | | | | | | | |
| DEX0488_{—} | 27321 | 52.8 | 52.8 | 55.6 | 55.6 | 51.9 | 51.9 | 90.0 | 90.0 | 38.5 | 38.5 |
| 028.nt.1 | | | | | | | | | | | |
| DEX0488_{—} | 33088 | 47.2 | 54.8 | 55.6 | 55.6 | 44.4 | 54.5 | 80.0 | 88.9 | 34.6 | 40.9 |
| 028.nt.1 | | | | | | | | | | | |
| DEX0488_{—} | 33088.2 | 50.0 | 51.4 | 55.6 | 55.6 | 48.1 | 50.0 | 90.0 | 90.0 | 34.6 | 36.0 |
| 028.nt.1 | | | | | | | | | | | |
| DEX0488_{—} | 25814 | 27.8 | 34.5 | 33.3 | 42.9 | 25.9 | 31.8 | 50.0 | 50.0 | 19.2 | 26.3 |
| 031.nt.1 | | | | | | | | | | | |
| DEX0488_{—} | 25815 | 47.2 | 51.5 | 55.6 | 55.6 | 44.4 | 50.0 | 60.0 | 60.0 | 42.3 | 47.8 |
| 031.nt.1 | | | | | | | | | | | |
| DEX0488_{—} | 22205 | 2.8 | 2.8 | 0.0 | 0.0 | 3.7 | 3.7 | 0.0 | 0.0 | 3.8 | 3.8 |
| 032.nt.1 | | | | | | | | | | | |
| DEX0488_{—} | 20561 | 5.6 | 5.6 | 0.0 | 0.0 | 7.4 | 7.4 | 0.0 | 0.0 | 7.7 | 7.7 |
| 035.nt.1 | | | | | | | | | | | |
| DEX0488_{—} | 41514 | 8.3 | 8.6 | 0.0 | 0.0 | 11.1 | 11.1 | 0.0 | 0.0 | 11.5 | 12.0 |
| 035.nt.1 | | | | | | | | | | | |
| DEX0488_{—} | 8877 | 8.3 | 9.4 | 0.0 | 0.0 | 11.1 | 12.0 | 0.0 | 0.0 | 11.5 | 13.6 |
| 035.nt.1 | | | | | | | | | | | |
| DEX0488_{—} | 20561 | 5.6 | 5.6 | 0.0 | 0.0 | 7.4 | 7.4 | 0.0 | 0.0 | 7.7 | 7.7 |
| 035.nt.2 | | | | | | | | | | | |
| DEX0488_{—} | 41514 | 8.3 | 8.6 | 0.0 | 0.0 | 11.1 | 11.1 | 0.0 | 0.0 | 11.5 | 12.0 |
| 035.nt.2 | | | | | | | | | | | |
| DEX0488_{—} | 8877 | 8.3 | 9.4 | 0.0 | 0.0 | 11.1 | 12.0 | 0.0 | 0.0 | 11.5 | 13.6 |
| 035.nt.2 | | | | | | | | | | | |

| | | | | | | | Mam 550 | Mam Cell | Mam |
|---|---|---|---|---|---|---|---|---|---|
| | | | Mam 550 | | Mam | Mam | ST2, 3 | Lines | Cell |
| | | Mam 550 | ALL | Mam 550 | 550 | 550 | % val | PMT | Lines |
| | | ALL | % valid | ST1 | ST1 | ST2, 3 | id | 550 | PMT 550 |
| | | % up | up | % up | % valid | % up | up | % up | % valid |
| DEX ID | Oligo Name | n = 36 | n = 36 | n = 9 | UP n = 9 | n = 27 | n = 27 | n = 6 | up n = 6 |
| DEX0488_{—} | 17244 | 19.4 | 19.4 | 22.2 | 22.2 | 18.5 | 18.5 | 33.3 | 33.3 |
| 008.nt.1 | | | | | | | | | |
| DEX0488_{—} | 17292 | 19.4 | 19.4 | 22.2 | 22.2 | 18.5 | 18.5 | 33.3 | 33.3 |
| 008.nt.1 | | | | | | | | | |
| DEX0488_{—} | 20399 | 22.2 | 22.9 | 33.3 | 37.5 | 18.5 | 18.5 | 33.3 | 33.3 |
| 008.nt.1 | | | | | | | | | |
| DEX0488_{—} | 17244 | 19.4 | 19.4 | 22.2 | 22.2 | 18.5 | 18.5 | 33.3 | 33.3 |
| 008.nt.2 | | | | | | | | | |
| DEX0488_{—} | 17292 | 19.4 | 19.4 | 22.2 | 22.2 | 18.5 | 18.5 | 33.3 | 33.3 |
| 008.nt.2 | | | | | | | | | |
| DEX0488_{—} | 20399 | 22.2 | 22.9 | 33.3 | 37.5 | 18.5 | 18.5 | 33.3 | 33.3 |
| 008.nt.2 | | | | | | | | | |
| DEX0488_{—} | 26770 | 52.8 | 63.3 | 55.6 | 83.3 | 51.9 | 58.3 | 66.7 | 80.0 |
| 010.nt.1 | | | | | | | | | |
| DEX0488_{—} | 39927 | 77.8 | 82.4 | 77.8 | 77.8 | 77.8 | 84.0 | 100.0 | 100.0 |
| 011.nt.1 | | | | | | | | | |
| DEX0488_{—} | 39927.2 | 86.1 | 86.1 | 77.8 | 77.8 | 88.9 | 88.9 | 100.0 | 100.0 |
| 011.nt.1 | | | | | | | | | |
| DEX0488_{—} | 39928 | 75.0 | 81.8 | 77.8 | 87.5 | 74.1 | 80.0 | 100.0 | 100.0 |
| 011.nt.1 | | | | | | | | | |
| DEX0488_{—} | 39928.2 | 75.0 | 77.1 | 77.8 | 77.8 | 74.1 | 76.9 | 100.0 | 100.0 |
| 011.nt.1 | | | | | | | | | |
| DEX0488_{—} | 21187 | 44.4 | 50.0 | 88.9 | 88.9 | 29.6 | 34.8 | 16.7 | 33.3 |
| 012.nt.1 | | | | | | | | | |
| DEX0488_{—} | 21187.2 | 44.4 | 50.0 | 88.9 | 88.9 | 29.6 | 34.8 | 16.7 | 33.3 |
| 012.nt.1 | | | | | | | | | |
| DEX0488_{—} | 21188 | 25.0 | 26.5 | 44.4 | 50.0 | 18.5 | 19.2 | 0.0 | 0.0 |
| 012.nt.1 | | | | | | | | | |
| DEX0488_{—} | 21188.2 | 25.0 | 25.7 | 44.4 | 44.4 | 18.5 | 19.2 | 0.0 | 0.0 |
| 012.nt.1 | | | | | | | | | |
| DEX0488_{—} | 21187 | 44.4 | 50.0 | 88.9 | 88.9 | 29.6 | 34.8 | 16.7 | 33.3 |
| 021.nt.1 | | | | | | | | | |
| DEX0488_{—} | 21187.2 | 44.4 | 50.0 | 88.9 | 88.9 | 29.6 | 34.8 | 16.7 | 33.3 |
| 021.nt.1 | | | | | | | | | |
| DEX0488_{—} | 21187 | 44.4 | 50.0 | 88.9 | 88.9 | 29.6 | 34.8 | 16.7 | 33.3 |
| 021.nt.2 | | | | | | | | | |
| DEX0488_{—} | 21187.2 | 44.4 | 50.0 | 88.9 | 88.9 | 29.6 | 34.8 | 16.7 | 33.3 |
| 021.nt.2 | | | | | | | | | |
| DEX0488_{—} | 8828 | 27.8 | 27.8 | 11.1 | 11.1 | 33.3 | 33.3 | 83.3 | 83.3 |
| 023.nt.1 | | | | | | | | | |
| DEX0488_{—} | 8828 | 27.8 | 27.8 | 11.1 | 11.1 | 33.3 | 33.3 | 83.3 | 83.3 |
| 023.nt.2 | | | | | | | | | |
| DEX0488_{—} | 24160 | 8.3 | 37.5 | 0.0 | 0.0 | 11.1 | 42.9 | 0.0 | 0.0 |
| 026.nt.1 | | | | | | | | | |
| DEX0488_{—} | 24160.2 | 8.3 | 37.5 | 0.0 | 0.0 | 11.1 | 42.9 | 0.0 | 0.0 |
| 026.nt.1 | | | | | | | | | |
| DEX0488_{—} | 15783 | 13.9 | 13.9 | 22.2 | 22.2 | 11.1 | 11.1 | 0.0 | 0.0 |
| 027.nt.1 | | | | | | | | | |
| DEX0488_{—} | 18644 | 13.9 | 33.3 | 22.2 | 50.0 | 11.1 | 27.3 | 0.0 | 0.0 |
| 027.nt.1 | | | | | | | | | |
| DEX0488_{—} | 18644.2 | 13.9 | 33.3 | 22.2 | 50.0 | 11.1 | 27.3 | 0.0 | 0.0 |
| 027.nt.1 | | | | | | | | | |
| DEX0488_{—} | 18645 | 13.9 | 38.5 | 22.2 | 66.7 | 11.1 | 30.0 | 0.0 | 0.0 |
| 027.nt.1 | | | | | | | | | |
| DEX0488_{—} | 18645.2 | 13.9 | 35.7 | 22.2 | 66.7 | 11.1 | 27.3 | 0.0 | 0.0 |
| 027.nt.1 | | | | | | | | | |
| DEX0488_{—} | 15783 | 13.9 | 13.9 | 22.2 | 22.2 | 11.1 | 11.1 | 0.0 | 0.0 |
| 027.nt.2 | | | | | | | | | |
| DEX0488_{—} | 18644 | 13.9 | 33.3 | 22.2 | 50.0 | 11.1 | 27.3 | 0.0 | 0.0 |
| 027.nt.2 | | | | | | | | | |
| DEX0488_{—} | 18644.2 | 13.9 | 33.3 | 22.2 | 50.0 | 11.1 | 27.3 | 0.0 | 0.0 |
| 027.nt.2 | | | | | | | | | |
| DEX0488_{—} | 18645 | 13.9 | 38.5 | 22.2 | 66.7 | 11.1 | 30.0 | 0.0 | 0.0 |
| 027.nt.2 | | | | | | | | | |
| DEX0488_{—} | 18645.2 | 13.9 | 35.7 | 22.2 | 66.7 | 11.1 | 27.3 | 0.0 | 0.0 |
| 027.nt.2 | | | | | | | | | |
| DEX0488_{—} | 15783 | 13.9 | 13.9 | 22.2 | 22.2 | 11.1 | 11.1 | 0.0 | 0.0 |
| 027.nt.3 | | | | | | | | | |
| DEX0488_{—} | 18644 | 13.9 | 33.3 | 22.2 | 50.0 | 11.1 | 27.3 | 0.0 | 0.0 |
| 027.nt.3 | | | | | | | | | |
| DEX0488_{—} | 18644.2 | 13.9 | 33.3 | 22.2 | 50.0 | 11.1 | 27.3 | 0.0 | 0.0 |
| 027.nt.3 | | | | | | | | | |
| DEX0488_{—} | 18645 | 13.9 | 38.5 | 22.2 | 66.7 | 11.1 | 30.0 | 0.0 | 0.0 |
| 027.nt.3 | | | | | | | | | |
| DEX0488_{—} | 18645.2 | 13.9 | 35.7 | 22.2 | 66.7 | 11.1 | 27.3 | 0.0 | 0.0 |
| 027.nt.3 | | | | | | | | | |
| DEX0488_{—} | 15783 | 13.9 | 13.9 | 22.2 | 22.2 | 11.1 | 11.1 | 0.0 | 0.0 |
| 027.nt.4 | | | | | | | | | |
| DEX0488_{—} | 18644 | 13.9 | 33.3 | 22.2 | 50.0 | 11.1 | 27.3 | 0.0 | 0.0 |
| 027.nt.4 | | | | | | | | | |
| DEX0488_{—} | 18644.2 | 13.9 | 33.3 | 22.2 | 50.0 | 11.1 | 27.3 | 0.0 | 0.0 |
| 027.nt.4 | | | | | | | | | |
| DEX0488_{—} | 18645 | 13.9 | 38.5 | 22.2 | 66.7 | 11.1 | 30.0 | 0.0 | 0.0 |
| 027.nt.4 | | | | | | | | | |
| DEX0488_{—} | 18645.2 | 13.9 | 35.7 | 22.2 | 66.7 | 11.1 | 27.3 | 0.0 | 0.0 |
| 027.nt.4 | | | | | | | | | |
| DEX0488_{—} | 27321 | 52.8 | 57.6 | 55.6 | 62.5 | 51.9 | 56.0 | 66.7 | 80.0 |
| 028.nt.1 | | | | | | | | | |
| DEX0488_{—} | 33088 | 50.0 | 58.1 | 55.6 | 62.5 | 48.1 | 56.5 | 66.7 | 80.0 |
| 028.nt.1 | | | | | | | | | |
| DEX0488_{—} | 33088.2 | 50.0 | 56.2 | 55.6 | 62.5 | 48.1 | 54.2 | 66.7 | 80.0 |
| 028.nt.1 | | | | | | | | | |
| DEX0488_{—} | 25814 | 36.1 | 56.5 | 33.3 | 42.9 | 37.0 | 62.5 | 0.0 | 0.0 |
| 031.nt.1 | | | | | | | | | |
| DEX0488_{—} | 25815 | 50.0 | 56.2 | 55.6 | 55.6 | 48.1 | 56.5 | 0.0 | 0.0 |
| 031.nt.1 | | | | | | | | | |
| DEX0488_{—} | 22205 | 5.6 | 5.6 | 0.0 | 0.0 | 7.4 | 7.4 | 16.7 | 16.7 |
| 032.nt.1 | | | | | | | | | |
| DEX0488_{—} | 20561 | 11.1 | 11.1 | 11.1 | 11.1 | 11.1 | 11.1 | 83.3 | 83.3 |
| 035.nt.1 | | | | | | | | | |
| DEX0488_{—} | 41514 | 8.3 | 9.7 | 0.0 | 0.0 | 11.1 | 12.5 | 50.0 | 60.0 |
| 035.nt.1 | | | | | | | | | |
| DEX0488_{—} | 8877 | 11.1 | 14.3 | 0.0 | 0.0 | 14.8 | 19.0 | 50.0 | 60.0 |
| 035.nt.1 | | | | | | | | | |
| DEX0488_{—} | 20561 | 11.1 | 11.1 | 11.1 | 11.1 | 11.1 | 11.1 | 83.3 | 83.3 |
| 035.nt.2 | | | | | | | | | |
| DEX0488_{—} | 41514 | 8.3 | 9.7 | 0.0 | 0.0 | 11.1 | 12.5 | 50.0 | 60.0 |
| 035.nt.2 | | | | | | | | | |
| DEX0488_{—} | 8877 | 11.1 | 14.3 | 0.0 | 0.0 | 14.8 | 19.0 | 50.0 | 60.0 |
| 035.nt.2 | | | | | | | | | |

[0507] TABLE 14

| | | Mam | | Mam | | | |
|---|---|---|---|---|---|---|---|
| | | 550 | Mam 550 | 550 | Mam 550 | Mam 550 | Mam 550 |
| | | ALL | ALL | ST1 | ST1 | ST2, 3 | ST2, 3 |
| | Oligo | % up | % valid up | % up | % valid | % up | % valid up |
| DEX ID | Name | n = 36 | n = 36 | n = 9 | up n = 9 | n = 27 | n = 27 |
| DEX0488_008.nt.1 | 17244 | 19.4 | 19.4 | 22.2 | 22.2 | 18.5 | 18.5 |
| DEX0488_008.nt.1 | 17292 | 19.4 | 19.4 | 22.2 | 22.2 | 18.5 | 18.5 |
| DEX0488_008.nt.1 | 20399 | 22.2 | 22.9 | 33.3 | 37.5 | 18.5 | 18.5 |
| DEX0488_008.nt.2 | 17244 | 19.4 | 19.4 | 22.2 | 22.2 | 18.5 | 18.5 |
| DEX0488_008.nt.2 | 17292 | 19.4 | 19.4 | 22.2 | 22.2 | 18.5 | 18.5 |
| DEX0488_008.nt.2 | 20399 | 22.2 | 22.9 | 33.3 | 37.5 | 18.5 | 18.5 |
| DEX0488_010.nt.1 | 26770 | 52.8 | 63.3 | 55.6 | 83.3 | 51.9 | 58.3 |
| DEX0488_011.nt.1 | 39927 | 77.8 | 82.4 | 77.8 | 77.8 | 77.8 | 84.0 |
| DEX0488_011.nt.1 | 39927.2 | 86.1 | 86.1 | 77.8 | 77.8 | 88.9 | 88.9 |
| DEX0488_011.nt.1 | 39928 | 75.0 | 81.8 | 77.8 | 87.5 | 74.1 | 80.0 |
| DEX0488_011.nt.1 | 39928.2 | 75.0 | 77.1 | 77.8 | 77.8 | 74.1 | 76.9 |
| DEX0488_012.nt.1 | 21187 | 44.4 | 50.0 | 88.9 | 88.9 | 29.6 | 34.8 |
| DEX0488_012.nt.1 | 21187.2 | 44.4 | 50.0 | 88.9 | 88.9 | 29.6 | 34.8 |
| DEX0488_012.nt.1 | 21188 | 25.0 | 26.5 | 44.4 | 50.0 | 18.5 | 19.2 |
| DEX0488_012.nt.1 | 21188.2 | 25.0 | 25.7 | 44.4 | 44.4 | 18.5 | 19.2 |
| DEX0488_021.nt.1 | 21187 | 44.4 | 50.0 | 88.9 | 88.9 | 29.6 | 34.8 |
| DEX0488_021.nt.1 | 21187.2 | 44.4 | 50.0 | 88.9 | 88.9 | 29.6 | 34.8 |
| DEX0488_021.nt.2 | 21187 | 44.4 | 50.0 | 88.9 | 88.9 | 29.6 | 34.8 |
| DEX0488_021.nt.2 | 21187.2 | 44.4 | 50.0 | 88.9 | 88.9 | 29.6 | 34.8 |
| DEX0488_023.nt.1 | 8828 | 27.8 | 27.8 | 11.1 | 11.1 | 33.3 | 33.3 |
| DEX0488_023.nt.2 | 8828 | 27.8 | 27.8 | 11.1 | 11.1 | 33.3 | 33.3 |
| DEX0488_026.nt.1 | 24160 | 8.3 | 37.5 | 0.0 | 0.0 | 11.1 | 42.9 |
| DEX0488_026.nt.1 | 24160.2 | 8.3 | 37.5 | 0.0 | 0.0 | 11.1 | 42.9 |
| DEX0488_027.nt.1 | 15783 | 13.9 | 13.9 | 22.2 | 22.2 | 11.1 | 11.1 |
| DEX0488_027.nt.1 | 18644 | 13.9 | 33.3 | 22.2 | 50.0 | 11.1 | 27.3 |
| DEX0488_027.nt.1 | 18644.2 | 13.9 | 33.3 | 22.2 | 50.0 | 11.1 | 27.3 |
| DEX0488_027.nt.1 | 18645 | 13.9 | 38.5 | 22.2 | 66.7 | 11.1 | 30.0 |
| DEX0488_027.nt.1 | 18645.2 | 13.9 | 35.7 | 22.2 | 66.7 | 11.1 | 27.3 |
| DEX0488_027.nt.2 | 15783 | 13.9 | 13.9 | 22.2 | 22.2 | 11.1 | 11.1 |
| DEX0488_027.nt.2 | 18644 | 13.9 | 33.3 | 22.2 | 50.0 | 11.1 | 27.3 |
| DEX0488_027.nt.2 | 18644.2 | 13.9 | 33.3 | 22.2 | 50.0 | 11.1 | 27.3 |
| DEX0488_027.nt.2 | 18645 | 13.9 | 38.5 | 22.2 | 66.7 | 11.1 | 30.0 |
| DEX0488_027.nt.2 | 18645.2 | 13.9 | 35.7 | 22.2 | 66.7 | 11.1 | 27.3 |
| DEX0488_027.nt.3 | 15783 | 13.9 | 13.9 | 22.2 | 22.2 | 11.1 | 11.1 |
| DEX0488_027.nt.3 | 18644 | 13.9 | 33.3 | 22.2 | 50.0 | 11.1 | 27.3 |
| DEX0488_027.nt.3 | 18644.2 | 13.9 | 33.3 | 22.2 | 50.0 | 11.1 | 27.3 |
| DEX0488_027.nt.3 | 18645 | 13.9 | 38.5 | 22.2 | 66.7 | 11.1 | 30.0 |
| DEX0488_027.nt.3 | 18645.2 | 13.9 | 35.7 | 22.2 | 66.7 | 11.1 | 27.3 |
| DEX0488_027.nt.4 | 15783 | 13.9 | 13.9 | 22.2 | 22.2 | 11.1 | 11.1 |
| DEX0488_027.nt.4 | 18644 | 13.9 | 33.3 | 22.2 | 50.0 | 11.1 | 27.3 |
| DEX0488_027.nt.4 | 18644.2 | 13.9 | 33.3 | 22.2 | 50.0 | 11.1 | 27.3 |
| DEX0488_027.nt.4 | 18645 | 13.9 | 38.5 | 22.2 | 66.7 | 11.1 | 30.0 |
| DEX0488_027.nt.4 | 18645.2 | 13.9 | 35.7 | 22.2 | 66.7 | 11.1 | 27.3 |
| DEX0488_028.nt.1 | 27321 | 52.8 | 57.6 | 55.6 | 62.5 | 51.9 | 56.0 |
| DEX0488_028.nt.1 | 33088 | 50.0 | 58.1 | 55.6 | 62.5 | 48.1 | 56.5 |
| DEX0488_028.nt.1 | 33088.2 | 50.0 | 56.2 | 55.6 | 62.5 | 48.1 | 54.2 |
| DEX0488_031.nt.1 | 25814 | 36.1 | 56.5 | 33.3 | 42.9 | 37.0 | 62.5 |
| DEX0488_031.nt.1 | 25815 | 50.0 | 56.2 | 55.6 | 55.6 | 48.1 | 56.5 |
| DEX0488_032.nt.1 | 22205 | 5.6 | 5.6 | 0.0 | 0.0 | 7.4 | 7.4 |
| DEX0488_035.nt.1 | 20561 | 11.1 | 11.1 | 11.1 | 11.1 | 11.1 | 11.1 |
| DEX0488_035.nt.1 | 41514 | 8.3 | 9.7 | 0.0 | 0.0 | 11.1 | 12.5 |
| DEX0488_035.nt.1 | 8877 | 11.1 | 14.3 | 0.0 | 0.0 | 14.8 | 19.0 |
| DEX0488_035.nt.2 | 20561 | 11.1 | 11.1 | 11.1 | 11.1 | 11.1 | 11.1 |
| DEX0488_035.nt.2 | 41514 | 8.3 | 9.7 | 0.0 | 0.0 | 11.1 | 12.5 |
| DEX0488_035.nt.2 | 8877 | 11.1 | 14.3 | 0.0 | 0.0 | 14.8 | 19.0 |

[0508] TABLE 15

| | | | Mam | Mam | | | | Mam | |
|---|---|---|---|---|---|---|---|---|---|
| | | Mam | HER2 | NOT | | Mam | Mam ER | NOT | |
| | | HER2 | up | HER2 | Mam NOT | ER | up | ER | Mam NOT |
| | | up | % valid | up | HER2 up | up | % valid | up | ER up |
| | Oligo | % up | up | % up | % valid | % up | up | % up | % valid |
| DEX ID | Name | n = 10 | n = 10 | n = 26 | up n = 26 | n = 20 | n = 20 | n = 16 | up n = 16 |
| DEX0488_008.nt.1 | 17244 | 30.0 | 33.3 | 11.5 | 11.5 | 30.0 | 31.6 | 0.0 | 0.0 |
| DEX0488_008.nt.1 | 17292 | 40.0 | 40.0 | 11.5 | 11.5 | 35.0 | 35.0 | 0.0 | 0.0 |
| DEX0488_008.nt.1 | 20399 | 40.0 | 40.0 | 11.5 | 12.0 | 35.0 | 35.0 | 0.0 | 0.0 |
| DEX0488_008.nt.2 | 17244 | 30.0 | 33.3 | 11.5 | 11.5 | 30.0 | 31.6 | 0.0 | 0.0 |
| DEX0488_008.nt.2 | 17292 | 40.0 | 40.0 | 11.5 | 11.5 | 35.0 | 35.0 | 0.0 | 0.0 |
| DEX0488_008.nt.2 | 20399 | 40.0 | 40.0 | 11.5 | 12.0 | 35.0 | 35.0 | 0.0 | 0.0 |
| DEX0488_010.nt.1 | 26770 | 70.0 | 70.0 | 46.2 | 50.0 | 85.0 | 85.0 | 12.5 | 14.3 |
| DEX0488_011.nt.1 | 39927 | 80.0 | 88.9 | 73.1 | 76.0 | 80.0 | 80.0 | 68.8 | 78.6 |
| DEX0488_011.nt.1 | 39927.2 | 80.0 | 80.0 | 84.6 | 84.6 | 80.0 | 80.0 | 87.5 | 87.5 |
| DEX0488_011.nt.1 | 39928 | 70.0 | 77.8 | 50.0 | 52.0 | 50.0 | 52.6 | 62.5 | 66.7 |
| DEX0488_011.nt.1 | 39928.2 | 70.0 | 77.8 | 69.2 | 69.2 | 70.0 | 70.0 | 68.8 | 73.3 |
| DEX0488_012.nt.1 | 21187 | 60.0 | 60.0 | 30.8 | 32.0 | 30.0 | 30.0 | 50.0 | 53.3 |
| DEX0488_012.nt.1 | 21187.2 | 60.0 | 60.0 | 34.6 | 36.0 | 35.0 | 35.0 | 50.0 | 53.3 |
| DEX0488_012.nt.1 | 21188 | 10.0 | 12.5 | 26.9 | 31.8 | 25.0 | 27.8 | 18.8 | 25.0 |
| DEX0488_012.nt.1 | 21188.2 | 10.0 | 11.1 | 26.9 | 26.9 | 25.0 | 26.3 | 18.8 | 18.8 |
| DEX0488_021.nt.1 | 21187 | 60.0 | 60.0 | 30.8 | 32.0 | 30.0 | 30.0 | 50.0 | 53.3 |
| DEX0488_021.nt.1 | 21187.2 | 60.0 | 60.0 | 34.6 | 36.0 | 35.0 | 35.0 | 50.0 | 53.3 |
| DEX0488_021.nt.2 | 21187 | 60.0 | 60.0 | 30.8 | 32.0 | 30.0 | 30.0 | 50.0 | 53.3 |
| DEX0488_021.nt.2 | 21187.2 | 60.0 | 60.0 | 34.6 | 36.0 | 35.0 | 35.0 | 50.0 | 53.3 |
| DEX0488_023.nt.1 | 8828 | 10.0 | 10.0 | 23.1 | 23.1 | 5.0 | 5.0 | 37.5 | 37.5 |
| DEX0488_023.nt.2 | 8828 | 10.0 | 10.0 | 23.1 | 23.1 | 5.0 | 5.0 | 37.5 | 37.5 |
| DEX0488_026.nt.1 | 24160 | 10.0 | 16.7 | 7.7 | 16.7 | 5.0 | 9.1 | 12.5 | 28.6 |
| DEX0488_026.nt.1 | 24160.2 | 10.0 | 20.0 | 7.7 | 15.4 | 5.0 | 8.3 | 12.5 | 33.3 |
| DEX0488_027.nt.1 | 15783 | 10.0 | 10.0 | 15.4 | 15.4 | 0.0 | 0.0 | 31.2 | 31.2 |
| DEX0488_027.nt.1 | 18644 | 10.0 | 14.3 | 15.4 | 23.5 | 0.0 | 0.0 | 31.2 | 41.7 |
| DEX0488_027.nt.1 | 18644.2 | 10.0 | 12.5 | 15.4 | 23.5 | 0.0 | 0.0 | 31.2 | 38.5 |
| DEX0488_027.nt.1 | 18645 | 10.0 | 14.3 | 15.4 | 26.7 | 0.0 | 0.0 | 31.2 | 45.5 |
| DEX0488_027.nt.1 | 18645.2 | 10.0 | 14.3 | 15.4 | 23.5 | 0.0 | 0.0 | 31.2 | 41.7 |
| DEX0488_027.nt.2 | 15783 | 10.0 | 10.0 | 15.4 | 15.4 | 0.0 | 0.0 | 31.2 | 31.2 |
| DEX0488_027.nt.2 | 18644 | 10.0 | 14.3 | 15.4 | 23.5 | 0.0 | 0.0 | 31.2 | 41.7 |
| DEX0488_027.nt.2 | 18644.2 | 10.0 | 12.5 | 15.4 | 23.5 | 0.0 | 0.0 | 31.2 | 38.5 |
| DEX0488_027.nt.2 | 18645 | 10.0 | 14.3 | 15.4 | 26.7 | 0.0 | 0.0 | 31.2 | 45.5 |
| DEX0488_027.nt.2 | 18645.2 | 10.0 | 14.3 | 15.4 | 23.5 | 0.0 | 0.0 | 31.2 | 41.7 |
| DEX0488_027.nt.3 | 15783 | 10.0 | 10.0 | 15.4 | 15.4 | 0.0 | 0.0 | 31.2 | 31.2 |
| DEX0488_027.nt.3 | 18644 | 10.0 | 14.3 | 15.4 | 23.5 | 0.0 | 0.0 | 31.2 | 41.7 |
| DEX0488_027.nt.3 | 18644.2 | 10.0 | 12.5 | 15.4 | 23.5 | 0.0 | 0.0 | 31.2 | 38.5 |
| DEX0488_027.nt.3 | 18645 | 10.0 | 14.3 | 15.4 | 26.7 | 0.0 | 0.0 | 31.2 | 45.5 |
| DEX0488_027.nt.3 | 18645.2 | 10.0 | 14.3 | 15.4 | 23.5 | 0.0 | 0.0 | 31.2 | 41.7 |
| DEX0488_027.nt.4 | 15783 | 10.0 | 10.0 | 15.4 | 15.4 | 0.0 | 0.0 | 31.2 | 31.2 |
| DEX0488_027.nt.4 | 18644 | 10.0 | 14.3 | 15.4 | 23.5 | 0.0 | 0.0 | 31.2 | 41.7 |
| DEX0488_027.nt.4 | 18644.2 | 10.0 | 12.5 | 15.4 | 23.5 | 0.0 | 0.0 | 31.2 | 38.5 |
| DEX0488_027.nt.4 | 18645 | 10.0 | 14.3 | 15.4 | 26.7 | 0.0 | 0.0 | 31.2 | 45.5 |
| DEX0488_027.nt.4 | 18645.2 | 10.0 | 14.3 | 15.4 | 23.5 | 0.0 | 0.0 | 31.2 | 41.7 |
| DEX0488_028.nt.1 | 27321 | 70.0 | 70.0 | 46.2 | 46.2 | 85.0 | 85.0 | 12.5 | 12.5 |
| DEX0488_028.nt.1 | 33088 | 60.0 | 66.7 | 42.3 | 50.0 | 75.0 | 83.3 | 12.5 | 15.4 |
| DEX0488_028.nt.1 | 33088.2 | 60.0 | 66.7 | 46.2 | 46.2 | 80.0 | 84.2 | 12.5 | 12.5 |
| DEX0488_031.nt.1 | 25814 | 20.0 | 28.6 | 30.8 | 36.4 | 40.0 | 47.1 | 12.5 | 16.7 |
| DEX0488_031.nt.1 | 25815 | 50.0 | 55.6 | 46.2 | 50.0 | 50.0 | 58.8 | 43.8 | 43.8 |
| DEX0488_032.nt.1 | 22205 | 0.0 | 0.0 | 3.8 | 3.8 | 5.0 | 5.0 | 0.0 | 0.0 |
| DEX0488_035.nt.1 | 20561 | 0.0 | 0.0 | 7.7 | 7.7 | 10.0 | 10.0 | 0.0 | 0.0 |
| DEX0488_035.nt.1 | 41514 | 10.0 | 10.0 | 7.7 | 8.0 | 15.0 | 15.0 | 0.0 | 0.0 |
| DEX0488_035.nt.1 | 8877 | 10.0 | 10.0 | 7.7 | 9.1 | 15.0 | 16.7 | 0.0 | 0.0 |
| DEX0488_035.nt.2 | 20561 | 0.0 | 0.0 | 7.7 | 7.7 | 10.0 | 10.0 | 0.0 | 0.0 |
| DEX0488_035.nt.2 | 41514 | 10.0 | 10.0 | 7.7 | 8.0 | 15.0 | 15.0 | 0.0 | 0.0 |
| DEX0488_035.nt.2 | 8877 | 10.0 | 10.0 | 7.7 | 9.1 | 15.0 | 16.7 | 0.0 | 0.0 |

[0509] TABLE 16

| | | Mam Cell | Mam Cell | Mam Cell | Mam Cell Lines |
|---|---|---|---|---|---|
| | Oligo | Lines % up | Lines % valid | Lines PMT | PMT 550 % valid |
| DEX ID | Name | n = 6 | up n = 6 | 550 % up n = 6 | up n = 6 |
| DEX0488_008.nt.1 | 17244 | 16.7 | 20.0 | 33.3 | 33.3 |
| DEX0488_008.nt.1 | 17292 | 16.7 | 20.0 | 33.3 | 33.3 |
| DEX0488_008.nt.1 | 20399 | 16.7 | 20.0 | 33.3 | 33.3 |
| DEX0488_008.nt.2 | 17244 | 16.7 | 20.0 | 33.3 | 33.3 |
| DEX0488_008.nt.2 | 17292 | 16.7 | 20.0 | 33.3 | 33.3 |
| DEX0488_008.nt.2 | 20399 | 16.7 | 20.0 | 33.3 | 33.3 |
| DEX0488_010.nt.1 | 26770 | 66.7 | 80.0 | 66.7 | 80.0 |
| DEX0488_011.nt.1 | 39927 | 100.0 | 100.0 | 100.0 | 100.0 |
| DEX0488_011.nt.1 | 39927.2 | 100.0 | 100.0 | 100.0 | 100.0 |
| DEX0488_011.nt.1 | 39928 | 100.0 | 100.0 | 100.0 | 100.0 |
| DEX0488_011.nt.1 | 39928.2 | 100.0 | 100.0 | 100.0 | 100.0 |
| DEX0488_012.nt.1 | 21187 | 16.7 | 25.0 | 16.7 | 33.3 |
| DEX0488_012.nt.1 | 21187.2 | 16.7 | 25.0 | 16.7 | 33.3 |
| DEX0488_012.nt.1 | 21188 | 0.0 | 0.0 | 0.0 | 0.0 |
| DEX0488_012.nt.1 | 21188.2 | 0.0 | 0.0 | 0.0 | 0.0 |
| DEX0488_021.nt.1 | 21187 | 16.7 | 25.0 | 16.7 | 33.3 |
| DEX0488_021.nt.1 | 21187.2 | 16.7 | 25.0 | 16.7 | 33.3 |
| DEX0488_021.nt.2 | 21187 | 16.7 | 25.0 | 16.7 | 33.3 |
| DEX0488_021.nt.2 | 21187.2 | 16.7 | 25.0 | 16.7 | 33.3 |
| DEX0488_023.nt.1 | 8828 | 83.3 | 83.3 | 83.3 | 83.3 |
| DEX0488_023.nt.2 | 8828 | 83.3 | 83.3 | 83.3 | 83.3 |
| DEX0488_026.nt.1 | 24160 | 0.0 | 0.0 | 0.0 | 0.0 |
| DEX0488_026.nt.1 | 24160.2 | 0.0 | 0.0 | 0.0 | 0.0 |
| DEX0488_027.nt.1 | 15783 | 0.0 | 0.0 | 0.0 | 0.0 |
| DEX0488_027.nt.1 | 18644 | 0.0 | 0.0 | 0.0 | 0.0 |
| DEX0488_027.nt.1 | 18644.2 | 0.0 | 0.0 | 0.0 | 0.0 |
| DEX0488_027.nt.1 | 18645 | 0.0 | 0.0 | 0.0 | 0.0 |
| DEX0488_027.nt.1 | 18645.2 | 0.0 | 0.0 | 0.0 | 0.0 |
| DEX0488_027.nt.2 | 15783 | 0.0 | 0.0 | 0.0 | 0.0 |
| DEX0488_027.nt.2 | 18644 | 0.0 | 0.0 | 0.0 | 0.0 |
| DEX0488_027.nt.2 | 18644.2 | 0.0 | 0.0 | 0.0 | 0.0 |
| DEX0488_027.nt.2 | 18645 | 0.0 | 0.0 | 0.0 | 0.0 |
| DEX0488_027.nt.2 | 18645.2 | 0.0 | 0.0 | 0.0 | 0.0 |
| DEX0488_027.nt.3 | 15783 | 0.0 | 0.0 | 0.0 | 0.0 |
| DEX0488_027.nt.3 | 18644 | 0.0 | 0.0 | 0.0 | 0.0 |
| DEX0488_027.nt.3 | 18644.2 | 0.0 | 0.0 | 0.0 | 0.0 |
| DEX0488_027.nt.3 | 18645 | 0.0 | 0.0 | 0.0 | 0.0 |
| DEX0488_027.nt.3 | 18645.2 | 0.0 | 0.0 | 0.0 | 0.0 |
| DEX0488_027.nt.4 | 15783 | 0.0 | 0.0 | 0.0 | 0.0 |
| DEX0488_027.nt.4 | 18644 | 0.0 | 0.0 | 0.0 | 0.0 |
| DEX0488_027.nt.4 | 18644.2 | 0.0 | 0.0 | 0.0 | 0.0 |
| DEX0488_027.nt.4 | 18645 | 0.0 | 0.0 | 0.0 | 0.0 |
| DEX0488_027.nt.4 | 18645.2 | 0.0 | 0.0 | 0.0 | 0.0 |
| DEX0488_028.nt.1 | 27321 | 66.7 | 80.0 | 66.7 | 80.0 |
| DEX0488_028.nt.1 | 33088 | 66.7 | 80.0 | 66.7 | 80.0 |
| DEX0488_028.nt.1 | 33088.2 | 66.7 | 80.0 | 66.7 | 80.0 |
| DEX0488_031.nt.1 | 25814 | 0.0 | 0.0 | 0.0 | 0.0 |
| DEX0488_031.nt.1 | 25815 | 0.0 | 0.0 | 0.0 | 0.0 |
| DEX0488_032.nt.1 | 22205 | 16.7 | 16.7 | 16.7 | 16.7 |
| DEX0488_035.nt.1 | 20561 | 50.0 | 50.0 | 83.3 | 83.3 |
| DEX0488_035.nt.1 | 41514 | 16.7 | 16.7 | 50.0 | 60.0 |
| DEX0488_035.nt.1 | 8877 | 16.7 | 20.0 | 50.0 | 60.0 |
| DEX0488_035.nt.2 | 20561 | 50.0 | 50.0 | 83.3 | 83.3 |
| DEX0488_035.nt.2 | 41514 | 16.7 | 16.7 | 50.0 | 60.0 |
| DEX0488_035.nt.2 | 8877 | 16.7 | 20.0 | 50.0 | 60.0 |

[0510] TABLE 17

| | | | Mam | | Mam | Mam | Mam |
|---|---|---|---|---|---|---|---|
| | | Mam | Multi- | Mam | Multi- | Multi- | Multi- |
| | | Multi- | cancer | Multi- | cancer | cancer | cancer |
| | | cancer | ALL | cancer | ST1 | ST2, 3 | ST2, 3 |
| | Oligo | ALL % up | % valid | ST1 % up | % valid | % up | % valid |
| DEX ID | Name | n = 20 | up n = 20 | n = 9 | up n = 9 | n = 11 | up n = 11 |
| DEX0488_001.nt.1 | 79931 | 60.0 | 60.0 | 66.7 | 66.7 | 54.5 | 54.5 |
| DEX0488_001.nt.1 | 79931.1 | 65.0 | 65.0 | 66.7 | 66.7 | 63.6 | 63.6 |
| DEX0488_001.nt.1 | 79932 | 75.0 | 75.0 | 88.9 | 88.9 | 63.6 | 63.6 |
| DEX0488_001.nt.1 | 79932.1 | 85.0 | 85.0 | 88.9 | 88.9 | 81.8 | 81.8 |
| DEX0488_001.nt.10 | 79931 | 60.0 | 60.0 | 66.7 | 66.7 | 54.5 | 54.5 |
| DEX0488_001.nt.10 | 79931.1 | 65.0 | 65.0 | 66.7 | 66.7 | 63.6 | 63.6 |
| DEX0488_001.nt.10 | 79932 | 75.0 | 75.0 | 88.9 | 88.9 | 63.6 | 63.6 |
| DEX0488_001.nt.10 | 79932.1 | 85.0 | 85.0 | 88.9 | 88.9 | 81.8 | 81.8 |
| DEX0488_001.nt.11 | 79931 | 60.0 | 60.0 | 66.7 | 66.7 | 54.5 | 54.5 |
| DEX0488_001.nt.11 | 79931.1 | 65.0 | 65.0 | 66.7 | 66.7 | 63.6 | 63.6 |
| DEX0488_001.nt.11 | 79932 | 75.0 | 75.0 | 88.9 | 88.9 | 63.6 | 63.6 |
| DEX0488_001.nt.11 | 79932.1 | 85.0 | 85.0 | 88.9 | 88.9 | 81.8 | 81.8 |
| DEX0488_001.nt.2 | 79931 | 60.0 | 60.0 | 66.7 | 66.7 | 54.5 | 54.5 |
| DEX0488_001.nt.2 | 79931.1 | 65.0 | 65.0 | 66.7 | 66.7 | 63.6 | 63.6 |
| DEX0488_001.nt.2 | 79932 | 75.0 | 75.0 | 88.9 | 88.9 | 63.6 | 63.6 |
| DEX0488_001.nt.2 | 79932.1 | 85.0 | 85.0 | 88.9 | 88.9 | 81.8 | 81.8 |
| DEX0488_001.nt.3 | 79931 | 60.0 | 60.0 | 66.7 | 66.7 | 54.5 | 54.5 |
| DEX0488_001.nt.3 | 79931.1 | 65.0 | 65.0 | 66.7 | 66.7 | 63.6 | 63.6 |
| DEX0488_001.nt.3 | 79932 | 75.0 | 75.0 | 88.9 | 88.9 | 63.6 | 63.6 |
| DEX0488_001.nt.3 | 79932.1 | 85.0 | 85.0 | 88.9 | 88.9 | 81.8 | 81.8 |
| DEX0488_001.nt.4 | 79931 | 60.0 | 60.0 | 66.7 | 66.7 | 54.5 | 54.5 |
| DEX0488_001.nt.4 | 79931.1 | 65.0 | 65.0 | 66.7 | 66.7 | 63.6 | 63.6 |
| DEX0488_001.nt.4 | 79932 | 75.0 | 75.0 | 88.9 | 88.9 | 63.6 | 63.6 |
| DEX0488_001.nt.4 | 79932.1 | 85.0 | 85.0 | 88.9 | 88.9 | 81.8 | 81.8 |
| DEX0488_001.nt.5 | 79931 | 60.0 | 60.0 | 66.7 | 66.7 | 54.5 | 54.5 |
| DEX0488_001.nt.5 | 79931.1 | 65.0 | 65.0 | 66.7 | 66.7 | 63.6 | 63.6 |
| DEX0488_001.nt.5 | 79932 | 75.0 | 75.0 | 88.9 | 88.9 | 63.6 | 63.6 |
| DEX0488_001.nt.5 | 79932.1 | 85.0 | 85.0 | 88.9 | 88.9 | 81.8 | 81.8 |
| DEX0488_001.nt.6 | 79931 | 60.0 | 60.0 | 66.7 | 66.7 | 54.5 | 54.5 |
| DEX0488_001.nt.6 | 79931.1 | 65.0 | 65.0 | 66.7 | 66.7 | 63.6 | 63.6 |
| DEX0488_001.nt.6 | 79932 | 75.0 | 75.0 | 88.9 | 88.9 | 63.6 | 63.6 |
| DEX0488_001.nt.6 | 79932.1 | 85.0 | 85.0 | 88.9 | 88.9 | 81.8 | 81.8 |
| DEX0488_001.nt.7 | 79931 | 60.0 | 60.0 | 66.7 | 66.7 | 54.5 | 54.5 |
| DEX0488_001.nt.7 | 79931.1 | 65.0 | 65.0 | 66.7 | 66.7 | 63.6 | 63.6 |
| DEX0488_001.nt.7 | 79932 | 75.0 | 75.0 | 88.9 | 88.9 | 63.6 | 63.6 |
| DEX0488_001.nt.7 | 79932.1 | 85.0 | 85.0 | 88.9 | 88.9 | 81.8 | 81.8 |
| DEX0488_001.nt.8 | 79931 | 60.0 | 60.0 | 66.7 | 66.7 | 54.5 | 54.5 |
| DEX0488_001.nt.8 | 79931.1 | 65.0 | 65.0 | 66.7 | 66.7 | 63.6 | 63.6 |
| DEX0488_001.nt.8 | 79932 | 75.0 | 75.0 | 88.9 | 88.9 | 63.6 | 63.6 |
| DEX0488_001.nt.8 | 79932.1 | 85.0 | 85.0 | 88.9 | 88.9 | 81.8 | 81.8 |
| DEX0488_001.nt.9 | 79931 | 60.0 | 60.0 | 66.7 | 66.7 | 54.5 | 54.5 |
| DEX0488_001.nt.9 | 79931.1 | 65.0 | 65.0 | 66.7 | 66.7 | 63.6 | 63.6 |
| DEX0488_001.nt.9 | 79932 | 75.0 | 75.0 | 88.9 | 88.9 | 63.6 | 63.6 |
| DEX0488_001.nt.9 | 79932.1 | 85.0 | 85.0 | 88.9 | 88.9 | 81.8 | 81.8 |
| DEX0488_002.nt.1 | 91111 | 5.0 | 5.0 | 11.1 | 11.1 | 0.0 | 0.0 |
| DEX0488_002.nt.1 | 91111.1 | 5.0 | 5.6 | 11.1 | 14.3 | 0.0 | 0.0 |
| DEX0488_002.nt.1 | 91112 | 5.0 | 6.2 | 11.1 | 14.3 | 0.0 | 0.0 |
| DEX0488_002.nt.1 | 91112.1 | 10.0 | 11.1 | 22.2 | 28.6 | 0.0 | 0.0 |
| DEX0488_002.nt.1 | 27921 | 0.0 | 0.0 | 0.0 | 0.0 | 0.0 | 0.0 |
| DEX0488_002.nt.1 | 27921.1 | 0.0 | 0.0 | 0.0 | 0.0 | 0.0 | 0.0 |
| DEX0488_002.nt.1 | 27922 | 0.0 | 0.0 | 0.0 | 0.0 | 0.0 | 0.0 |
| DEX0488_002.nt.1 | 27922.1 | 0.0 | 0.0 | 0.0 | 0.0 | 0.0 | 0.0 |
| DEX0488_002.nt.1 | 78855 | 5.0 | 5.0 | 11.1 | 11.1 | 0.0 | 0.0 |
| DEX0488_002.nt.1 | 78855.1 | 5.0 | 5.0 | 11.1 | 11.1 | 0.0 | 0.0 |
| DEX0488_002.nt.1 | 78856 | 5.0 | 5.0 | 11.1 | 11.1 | 0.0 | 0.0 |
| DEX0488_002.nt.1 | 78856.1 | 5.0 | 5.0 | 11.1 | 11.1 | 0.0 | 0.0 |
| DEX0488_003.nt.2 | 27921 | 0.0 | 0.0 | 0.0 | 0.0 | 0.0 | 0.0 |
| DEX0488_003.nt.2 | 27921.1 | 0.0 | 0.0 | 0.0 | 0.0 | 0.0 | 0.0 |
| DEX0488_003.nt.2 | 27922 | 0.0 | 0.0 | 0.0 | 0.0 | 0.0 | 0.0 |
| DEX0488_003.nt.2 | 27922.1 | 0.0 | 0.0 | 0.0 | 0.0 | 0.0 | 0.0 |
| DEX0488_003.nt.2 | 78855 | 5.0 | 5.0 | 11.1 | 11.1 | 0.0 | 0.0 |
| DEX0488_003.nt.2 | 78855.1 | 5.0 | 5.0 | 11.1 | 11.1 | 0.0 | 0.0 |
| DEX0488_003.nt.2 | 78856 | 5.0 | 5.0 | 11.1 | 11.1 | 0.0 | 0.0 |
| DEX0488_003.nt.2 | 78856.1 | 5.0 | 5.0 | 11.1 | 11.1 | 0.0 | 0.0 |
| DEX0488_003.nt.3 | 27921 | 0.0 | 0.0 | 0.0 | 0.0 | 0.0 | 0.0 |
| DEX0488_003.nt.3 | 27921.1 | 0.0 | 0.0 | 0.0 | 0.0 | 0.0 | 0.0 |
| DEX0488_003.nt.3 | 27922 | 0.0 | 0.0 | 0.0 | 0.0 | 0.0 | 0.0 |
| DEX0488_003.nt.3 | 27922.1 | 0.0 | 0.0 | 0.0 | 0.0 | 0.0 | 0.0 |
| DEX0488_003.nt.3 | 78855 | 5.0 | 5.0 | 11.1 | 11.1 | 0.0 | 0.0 |
| DEX0488_003.nt.3 | 78855.1 | 5.0 | 5.0 | 11.1 | 11.1 | 0.0 | 0.0 |
| DEX0488_003.nt.3 | 78856 | 5.0 | 5.0 | 11.1 | 11.1 | 0.0 | 0.0 |
| DEX0488_003.nt.3 | 78856.1 | 5.0 | 5.0 | 11.1 | 11.1 | 0.0 | 0.0 |
| DEX0488_003.nt.4 | 27921 | 0.0 | 0.0 | 0.0 | 0.0 | 0.0 | 0.0 |
| DEX0488_003.nt.4 | 27921.1 | 0.0 | 0.0 | 0.0 | 0.0 | 0.0 | 0.0 |
| DEX0488_003.nt.4 | 27922 | 0.0 | 0.0 | 0.0 | 0.0 | 0.0 | 0.0 |
| DEX0488_003.nt.4 | 27922.1 | 0.0 | 0.0 | 0.0 | 0.0 | 0.0 | 0.0 |
| DEX0488_003.nt.4 | 78855 | 5.0 | 5.0 | 11.1 | 11.1 | 0.0 | 0.0 |
| DEX0488_003.nt.4 | 78855.1 | 5.0 | 5.0 | 11.1 | 11.1 | 0.0 | 0.0 |
| DEX0488_003.nt.4 | 78856 | 5.0 | 5.0 | 11.1 | 11.1 | 0.0 | 0.0 |
| DEX0488_003.nt.4 | 78856.1 | 5.0 | 5.0 | 11.1 | 11.1 | 0.0 | 0.0 |
| DEX0488_003.nt.5 | 27921 | 0.0 | 0.0 | 0.0 | 0.0 | 0.0 | 0.0 |
| DEX0488_003.nt.5 | 27921.1 | 0.0 | 0.0 | 0.0 | 0.0 | 0.0 | 0.0 |
| DEX0488_003.nt.5 | 27922 | 0.0 | 0.0 | 0.0 | 0.0 | 0.0 | 0.0 |
| DEX0488_003.nt.5 | 27922.1 | 0.0 | 0.0 | 0.0 | 0.0 | 0.0 | 0.0 |
| DEX0488_003.nt.5 | 78855 | 5.0 | 5.0 | 11.1 | 11.1 | 0.0 | 0.0 |
| DEX0488_003.nt.5 | 78855.1 | 5.0 | 5.0 | 11.1 | 11.1 | 0.0 | 0.0 |
| DEX0488_003.nt.5 | 78856 | 5.0 | 5.0 | 11.1 | 11.1 | 0.0 | 0.0 |
| DEX0488_003.nt.5 | 78856.1 | 5.0 | 5.0 | 11.1 | 11.1 | 0.0 | 0.0 |
| DEX0488_003.nt.6 | 27921 | 0.0 | 0.0 | 0.0 | 0.0 | 0.0 | 0.0 |
| DEX0488_003.nt.6 | 27921.1 | 0.0 | 0.0 | 0.0 | 0.0 | 0.0 | 0.0 |
| DEX0488_003.nt.6 | 27922 | 0.0 | 0.0 | 0.0 | 0.0 | 0.0 | 0.0 |
| DEX0488_003.nt.6 | 27922.1 | 0.0 | 0.0 | 0.0 | 0.0 | 0.0 | 0.0 |
| DEX0488_003.nt.6 | 78855 | 5.0 | 5.0 | 11.1 | 11.1 | 0.0 | 0.0 |
| DEX0488_003.nt.6 | 78855.1 | 5.0 | 5.0 | 11.1 | 11.1 | 0.0 | 0.0 |
| DEX0488_003.nt.6 | 78856 | 5.0 | 5.0 | 11.1 | 11.1 | 0.0 | 0.0 |
| DEX0488_003.nt.6 | 78856.1 | 5.0 | 5.0 | 11.1 | 11.1 | 0.0 | 0.0 |
| DEX0488_003.nt.7 | 78855 | 5.0 | 5.0 | 11.1 | 11.1 | 0.0 | 0.0 |
| DEX0488_003.nt.7 | 78855.1 | 5.0 | 5.0 | 11.1 | 11.1 | 0.0 | 0.0 |
| DEX0488_003.nt.7 | 78856 | 5.0 | 5.0 | 11.1 | 11.1 | 0.0 | 0.0 |
| DEX0488_003.nt.7 | 78856.1 | 5.0 | 5.0 | 11.1 | 11.1 | 0.0 | 0.0 |
| DEX0488_004.nt.1 | 10666 | 0.0 | 0.0 | 0.0 | 0.0 | 0.0 | 0.0 |
| DEX0488_004.nt.1 | 10666.1 | 0.0 | 0.0 | 0.0 | 0.0 | 0.0 | 0.0 |
| DEX0488_004.nt.1 | 10667 | 0.0 | 0.0 | 0.0 | 0.0 | 0.0 | 0.0 |
| DEX0488_004.nt.1 | 10667.1 | 0.0 | 0.0 | 0.0 | 0.0 | 0.0 | 0.0 |
| DEX0488_005.nt.1 | 9744 | 10.0 | 10.0 | 22.2 | 22.2 | 0.0 | 0.0 |
| DEX0488_005.nt.1 | 9744.1 | 15.0 | 15.0 | 33.3 | 33.3 | 0.0 | 0.0 |
| DEX0488_005.nt.1 | 9745 | 25.0 | 25.0 | 33.3 | 33.3 | 18.2 | 18.2 |
| DEX0488_005.nt.1 | 9745.1 | 10.0 | 10.0 | 22.2 | 22.2 | 0.0 | 0.0 |
| DEX0488_006.nt.1 | 4353 | 20.0 | 23.5 | 22.2 | 28.6 | 18.2 | 20.0 |
| DEX0488_006.nt.1 | 4353.1 | 20.0 | 23.5 | 22.2 | 28.6 | 18.2 | 20.0 |
| DEX0488_006.nt.1 | 5804 | 20.0 | 23.5 | 22.2 | 28.6 | 18.2 | 20.0 |
| DEX0488_006.nt.1 | 5804.1 | 15.0 | 17.6 | 11.1 | 14.3 | 18.2 | 20.0 |
| DEX0488_006.nt.1 | 5804.2 | 15.0 | 17.6 | 11.1 | 14.3 | 18.2 | 20.0 |
| DEX0488_006.nt.1 | 92287 | 15.0 | 17.6 | 22.2 | 28.6 | 9.1 | 10.0 |
| DEX0488_006.nt.1 | 92287.1 | 15.0 | 17.6 | 11.1 | 14.3 | 18.2 | 20.0 |
| DEX0488_007.nt.1 | 41955 | 5.0 | 10.0 | 11.1 | 25.0 | 0.0 | 0.0 |
| DEX0488_007.nt.1 | 41955.1 | 5.0 | 9.1 | 11.1 | 25.0 | 0.0 | 0.0 |
| DEX0488_007.nt.1 | 41955.2 | 5.0 | 9.1 | 11.1 | 25.0 | 0.0 | 0.0 |
| DEX0488_007.nt.1 | 41955.3 | 10.0 | 22.2 | 22.2 | 50.0 | 0.0 | 0.0 |
| DEX0488_007.nt.1 | 41955.4 | 5.0 | 10.0 | 11.1 | 33.3 | 0.0 | 0.0 |
| DEX0488_007.nt.1 | 41956 | 5.0 | 9.1 | 11.1 | 25.0 | 0.0 | 0.0 |
| DEX0488_007.nt.1 | 41956.1 | 5.0 | 11.1 | 11.1 | 25.0 | 0.0 | 0.0 |
| DEX0488_007.nt.1 | 41956.2 | 5.0 | 9.1 | 11.1 | 25.0 | 0.0 | 0.0 |
| DEX0488_007.nt.1 | 41956.3 | 5.0 | 10.0 | 11.1 | 25.0 | 0.0 | 0.0 |
| DEX0488_007.nt.1 | 41956.4 | 10.0 | 15.4 | 22.2 | 40.0 | 0.0 | 0.0 |
| DEX0488_008.nt.1 | 17292 | 35.0 | 35.0 | 22.2 | 22.2 | 45.5 | 45.5 |
| DEX0488_008.nt.1 | 17292.1 | 30.0 | 30.0 | 22.2 | 22.2 | 36.4 | 36.4 |
| DEX0488_008.nt.1 | 17293 | 25.0 | 26.3 | 22.2 | 22.2 | 27.3 | 30.0 |
| DEX0488_008.nt.1 | 17293.1 | 30.0 | 30.0 | 22.2 | 22.2 | 36.4 | 36.4 |
| DEX0488_008.nt.1 | 2085 | 30.0 | 30.0 | 22.2 | 22.2 | 36.4 | 36.4 |
| DEX0488_008.nt.1 | 24404 | 30.0 | 30.0 | 22.2 | 22.2 | 36.4 | 36.4 |
| DEX0488_008.nt.1 | 24404.1 | 30.0 | 30.0 | 22.2 | 22.2 | 36.4 | 36.4 |
| DEX0488_008.nt.1 | 24405 | 25.0 | 26.3 | 22.2 | 22.2 | 27.3 | 30.0 |
| DEX0488_008.nt.1 | 24405.1 | 25.0 | 26.3 | 22.2 | 22.2 | 27.3 | 30.0 |
| DEX0488_008.nt.1 | 4909 | 35.0 | 35.0 | 22.2 | 22.2 | 45.5 | 45.5 |
| DEX0488_008.nt.1 | 4909.1 | 30.0 | 30.0 | 22.2 | 22.2 | 36.4 | 36.4 |
| DEX0488_008.nt.1 | 4910 | 25.0 | 26.3 | 22.2 | 22.2 | 27.3 | 30.0 |
| DEX0488_008.nt.1 | 4910.1 | 25.0 | 26.3 | 22.2 | 22.2 | 27.3 | 30.0 |
| DEX0488_008.nt.2 | 17292 | 35.0 | 35.0 | 22.2 | 22.2 | 45.5 | 45.5 |
| DEX0488_008.nt.2 | 17292.1 | 30.0 | 30.0 | 22.2 | 22.2 | 36.4 | 36.4 |
| DEX0488_008.nt.2 | 17293 | 25.0 | 26.3 | 22.2 | 22.2 | 27.3 | 30.0 |
| DEX0488_008.nt.2 | 17293.1 | 30.0 | 30.0 | 22.2 | 22.2 | 36.4 | 36.4 |
| DEX0488_008.nt.2 | 2085 | 30.0 | 30.0 | 22.2 | 22.2 | 36.4 | 36.4 |
| DEX0488_008.nt.2 | 24404 | 30.0 | 30.0 | 22.2 | 22.2 | 36.4 | 36.4 |
| DEX0488_008.nt.2 | 24404.1 | 30.0 | 30.0 | 22.2 | 22.2 | 36.4 | 36.4 |
| DEX0488_008.nt.2 | 24405 | 25.0 | 26.3 | 22.2 | 22.2 | 27.3 | 30.0 |
| DEX0488_008.nt.2 | 24405.1 | 25.0 | 26.3 | 22.2 | 22.2 | 27.3 | 30.0 |
| DEX0488_008.nt.2 | 4909 | 35.0 | 35.0 | 22.2 | 22.2 | 45.5 | 45.5 |
| DEX0488_008.nt.2 | 4909.1 | 30.0 | 30.0 | 22.2 | 22.2 | 36.4 | 36.4 |
| DEX0488_008.nt.2 | 4910 | 25.0 | 26.3 | 22.2 | 22.2 | 27.3 | 30.0 |
| DEX0488_008.nt.2 | 4910.1 | 25.0 | 26.3 | 22.2 | 22.2 | 27.3 | 30.0 |
| DEX0488_009.nt.1 | 79339 | 15.0 | 15.0 | 22.2 | 22.2 | 9.1 | 9.1 |
| DEX0488_009.nt.1 | 79339.1 | 15.0 | 18.8 | 22.2 | 25.0 | 9.1 | 12.5 |
| DEX0488_010.nt.1 | 26770 | 70.0 | 70.0 | 55.6 | 55.6 | 81.8 | 81.8 |
| DEX0488_010.nt.1 | 26770.1 | 70.0 | 73.7 | 55.6 | 62.5 | 81.8 | 81.8 |
| DEX0488_011.nt.1 | 33840 | 85.0 | 89.5 | 77.8 | 77.8 | 90.9 | 100.0 |
| DEX0488_011.nt.1 | 33840.1 | 80.0 | 80.0 | 66.7 | 66.7 | 90.9 | 90.9 |
| DEX0488_011.nt.1 | 33841 | 75.0 | 75.0 | 66.7 | 66.7 | 81.8 | 81.8 |
| DEX0488_011.nt.1 | 33841.1 | 75.0 | 75.0 | 66.7 | 66.7 | 81.8 | 81.8 |
| DEX0488_011.nt.1 | 39927 | 85.0 | 89.5 | 77.8 | 77.8 | 90.9 | 100.0 |
| DEX0488_011.nt.1 | 39927.1 | 90.0 | 90.0 | 77.8 | 77.8 | 100.0 | 100.0 |
| DEX0488_011.nt.1 | 39927.2 | 85.0 | 85.0 | 77.8 | 77.8 | 90.9 | 90.9 |
| DEX0488_011.nt.1 | 39927.3 | 90.0 | 90.0 | 77.8 | 77.8 | 100.0 | 100.0 |
| DEX0488_011.nt.1 | 39927.4 | 75.0 | 75.0 | 66.7 | 66.7 | 81.8 | 81.8 |
| DEX0488_011.nt.1 | 39928 | 75.0 | 78.9 | 66.7 | 66.7 | 81.8 | 90.0 |
| DEX0488_011.nt.1 | 39928.1 | 85.0 | 85.0 | 77.8 | 77.8 | 90.9 | 90.9 |
| DEX0488_011.nt.1 | 39928.2 | 70.0 | 70.0 | 66.7 | 66.7 | 72.7 | 72.7 |
| DEX0488_011.nt.1 | 39928.3 | 80.0 | 80.0 | 77.8 | 77.8 | 81.8 | 81.8 |
| DEX0488_011.nt.1 | 39928.4 | 80.0 | 80.0 | 66.7 | 66.7 | 90.9 | 90.9 |
| DEX0488_012.nt.1 | 21187 | 40.0 | 40.0 | 77.8 | 77.8 | 9.1 | 9.1 |
| DEX0488_012.nt.1 | 21187.1 | 40.0 | 42.1 | 77.8 | 77.8 | 9.1 | 10.0 |
| DEX0488_012.nt.1 | 21188 | 15.0 | 15.0 | 33.3 | 33.3 | 0.0 | 0.0 |
| DEX0488_012.nt.1 | 21188.1 | 15.0 | 15.0 | 33.3 | 33.3 | 0.0 | 0.0 |
| DEX0488_012.nt.1 | 78927 | 55.0 | 57.9 | 88.9 | 88.9 | 27.3 | 30.0 |
| DEX0488_012.nt.1 | 78927.1 | 65.0 | 68.4 | 88.9 | 88.9 | 45.5 | 50.0 |
| DEX0488_013.nt.1 | 79955 | 0.0 | 0.0 | 0.0 | 0.0 | 0.0 | 0.0 |
| DEX0488_013.nt.1 | 79955.1 | 5.0 | 5.0 | 0.0 | 0.0 | 9.1 | 9.1 |
| DEX0488_013.nt.1 | 79956 | 10.0 | 10.0 | 11.1 | 11.1 | 9.1 | 9.1 |
| DEX0488_013.nt.1 | 79956.1 | 10.0 | 10.0 | 11.1 | 11.1 | 9.1 | 9.1 |
| DEX0488_013.nt.1 | 79959 | 10.0 | 10.0 | 0.0 | 0.0 | 18.2 | 18.2 |
| DEX0488_013.nt.1 | 79959.1 | 10.0 | 10.0 | 11.1 | 11.1 | 9.1 | 9.1 |
| DEX0488_013.nt.1 | 79960 | 15.0 | 15.0 | 11.1 | 11.1 | 18.2 | 18.2 |
| DEX0488_013.nt.1 | 79960.1 | 10.0 | 12.5 | 0.0 | 0.0 | 18.2 | 25.0 |
| DEX0488_013.nt.1 | 79963 | 5.0 | 5.3 | 0.0 | 0.0 | 9.1 | 10.0 |
| DEX0488_013.nt.1 | 79963.1 | 10.0 | 10.0 | 22.2 | 22.2 | 0.0 | 0.0 |
| DEX0488_013.nt.1 | 79964 | 0.0 | 0.0 | 0.0 | 0.0 | 0.0 | 0.0 |
| DEX0488_013.nt.1 | 79964.1 | 5.0 | 5.0 | 0.0 | 0.0 | 9.1 | 9.1 |
| DEX0488_013.nt.2 | 79959 | 10.0 | 10.0 | 0.0 | 0.0 | 18.2 | 18.2 |
| DEX0488_013.nt.2 | 79959.1 | 10.0 | 10.0 | 11.1 | 11.1 | 9.1 | 9.1 |
| DEX0488_013.nt.2 | 79960 | 15.0 | 15.0 | 11.1 | 11.1 | 18.2 | 18.2 |
| DEX0488_013.nt.2 | 79960.1 | 10.0 | 12.5 | 0.0 | 0.0 | 18.2 | 25.0 |
| DEX0488_014.nt.1 | 90171 | 25.0 | 25.0 | 11.1 | 11.1 | 36.4 | 36.4 |
| DEX0488_014.nt.1 | 90171.1 | 30.0 | 30.0 | 11.1 | 11.1 | 45.5 | 45.5 |
| DEX0488_014.nt.1 | 90172 | 5.0 | 25.0 | 0.0 | 0.0 | 9.1 | 33.3 |
| DEX0488_014.nt.1 | 90172.1 | 20.0 | 21.1 | 0.0 | 0.0 | 36.4 | 40.0 |
| DEX0488_014.nt.2 | 90171 | 25.0 | 25.0 | 11.1 | 11.1 | 36.4 | 36.4 |
| DEX0488_014.nt.2 | 90171.1 | 30.0 | 30.0 | 11.1 | 11.1 | 45.5 | 45.5 |
| DEX0488_014.nt.2 | 90172 | 5.0 | 25.0 | 0.0 | 0.0 | 9.1 | 33.3 |
| DEX0488_014.nt.2 | 90172.1 | 20.0 | 21.1 | 0.0 | 0.0 | 36.4 | 40.0 |
| DEX0488_014.nt.3 | 90171 | 25.0 | 25.0 | 11.1 | 11.1 | 36.4 | 36.4 |
| DEX0488_014.nt.3 | 90171.1 | 30.0 | 30.0 | 11.1 | 11.1 | 45.5 | 45.5 |
| DEX0488_014.nt.3 | 90172 | 5.0 | 25.0 | 0.0 | 0.0 | 9.1 | 33.3 |
| DEX0488_014.nt.3 | 90172.1 | 20.0 | 21.1 | 0.0 | 0.0 | 36.4 | 40.0 |
| DEX0488_014.nt.4 | 90171 | 25.0 | 25.0 | 11.1 | 11.1 | 36.4 | 36.4 |
| DEX0488_014.nt.4 | 90171.1 | 30.0 | 30.0 | 11.1 | 11.1 | 45.5 | 45.5 |
| DEX0488_014.nt.4 | 90172 | 5.0 | 25.0 | 0.0 | 0.0 | 9.1 | 33.3 |
| DEX0488_014.nt.4 | 90172.1 | 20.0 | 21.1 | 0.0 | 0.0 | 36.4 | 40.0 |
| DEX0488_015.nt.1 | 78631 | 60.0 | 66.7 | 55.6 | 62.5 | 63.6 | 70.0 |
| DEX0488_015.nt.1 | 78631.1 | 45.0 | 47.4 | 55.6 | 62.5 | 36.4 | 36.4 |
| DEX0488_015.nt.1 | 78632 | 25.0 | 25.0 | 22.2 | 22.2 | 27.3 | 27.3 |
| DEX0488_015.nt.1 | 78632.1 | 25.0 | 25.0 | 22.2 | 22.2 | 27.3 | 27.3 |
| DEX0488_015.nt.2 | 78631 | 60.0 | 66.7 | 55.6 | 62.5 | 63.6 | 70.0 |
| DEX0488_015.nt.2 | 78631.1 | 45.0 | 47.4 | 55.6 | 62.5 | 36.4 | 36.4 |
| DEX0488_015.nt.2 | 78632 | 25.0 | 25.0 | 22.2 | 22.2 | 27.3 | 27.3 |
| DEX0488_015.nt.2 | 78632.1 | 25.0 | 25.0 | 22.2 | 22.2 | 27.3 | 27.3 |
| DEX0488_016.nt.1 | 79660 | 30.0 | 33.3 | 33.3 | 33.3 | 27.3 | 33.3 |
| DEX0488_016.nt.1 | 79660.1 | 25.0 | 26.3 | 33.3 | 33.3 | 18.2 | 20.0 |
| DEX0488_016.nt.10 | 79659 | 0.0 | 0.0 | 0.0 | 0.0 | 0.0 | 0.0 |
| DEX0488_016.nt.10 | 79659.1 | 5.0 | 9.1 | 11.1 | 20.0 | 0.0 | 0.0 |
| DEX0488_016.nt.10 | 79660 | 30.0 | 33.3 | 33.3 | 33.3 | 27.3 | 33.3 |
| DEX0488_016.nt.10 | 79660.1 | 25.0 | 26.3 | 33.3 | 33.3 | 18.2 | 20.0 |
| DEX0488_016.nt.11 | 79659 | 0.0 | 0.0 | 0.0 | 0.0 | 0.0 | 0.0 |
| DEX0488_016.nt.11 | 79659.1 | 5.0 | 9.1 | 11.1 | 20.0 | 0.0 | 0.0 |
| DEX0488_016.nt.11 | 79660 | 30.0 | 33.3 | 33.3 | 33.3 | 27.3 | 33.3 |
| DEX0488_016.nt.11 | 79660.1 | 25.0 | 26.3 | 33.3 | 33.3 | 18.2 | 20.0 |
| DEX0488_016.nt.2 | 79660 | 30.0 | 33.3 | 33.3 | 33.3 | 27.3 | 33.3 |
| DEX0488_016.nt.2 | 79660.1 | 25.0 | 26.3 | 33.3 | 33.3 | 18.2 | 20.0 |
| DEX0488_016.nt.3 | 79660 | 30.0 | 33.3 | 33.3 | 33.3 | 27.3 | 33.3 |
| DEX0488_016.nt.3 | 79660.1 | 25.0 | 26.3 | 33.3 | 33.3 | 18.2 | 20.0 |
| DEX0488_016.nt.4 | 79660 | 30.0 | 33.3 | 33.3 | 33.3 | 27.3 | 33.3 |
| DEX0488_016.nt.4 | 79660.1 | 25.0 | 26.3 | 33.3 | 33.3 | 18.2 | 20.0 |
| DEX0488_016.nt.5 | 79660 | 30.0 | 33.3 | 33.3 | 33.3 | 27.3 | 33.3 |
| DEX0488_016.nt.5 | 79660.1 | 25.0 | 26.3 | 33.3 | 33.3 | 18.2 | 20.0 |
| DEX0488_016.nt.6 | 79660 | 30.0 | 33.3 | 33.3 | 33.3 | 27.3 | 33.3 |
| DEX0488_016.nt.6 | 79660.1 | 25.0 | 26.3 | 33.3 | 33.3 | 18.2 | 20.0 |
| DEX0488_016.nt.7 | 79660 | 30.0 | 33.3 | 33.3 | 33.3 | 27.3 | 33.3 |
| DEX0488_016.nt.7 | 79660.1 | 25.0 | 26.3 | 33.3 | 33.3 | 18.2 | 20.0 |
| DEX0488_016.nt.8 | 79660 | 30.0 | 33.3 | 33.3 | 33.3 | 27.3 | 33.3 |
| DEX0488_016.nt.8 | 79660.1 | 25.0 | 26.3 | 33.3 | 33.3 | 18.2 | 20.0 |
| DEX0488_016.nt.9 | 79660 | 30.0 | 33.3 | 33.3 | 33.3 | 27.3 | 33.3 |
| DEX0488_016.nt.9 | 79660.1 | 25.0 | 26.3 | 33.3 | 33.3 | 18.2 | 20.0 |
| DEX0488_017.nt.1 | 4353 | 20.0 | 23.5 | 22.2 | 28.6 | 18.2 | 20.0 |
| DEX0488_017.nt.1 | 4353.1 | 20.0 | 23.5 | 22.2 | 28.6 | 18.2 | 20.0 |
| DEX0488_017.nt.1 | 5804 | 20.0 | 23.5 | 22.2 | 28.6 | 18.2 | 20.0 |
| DEX0488_017.nt.1 | 5804.1 | 15.0 | 17.6 | 11.1 | 14.3 | 18.2 | 20.0 |
| DEX0488_017.nt.1 | 5804.2 | 15.0 | 17.6 | 11.1 | 14.3 | 18.2 | 20.0 |
| DEX0488_017.nt.1 | 92287 | 15.0 | 17.6 | 22.2 | 28.6 | 9.1 | 10.0 |
| DEX0488_017.nt.1 | 92287.1 | 15.0 | 17.6 | 11.1 | 14.3 | 18.2 | 20.0 |
| DEX0488_018.nt.1 | 79936 | 55.0 | 55.0 | 66.7 | 66.7 | 45.5 | 45.5 |
| DEX0488_018.nt.1 | 79936.1 | 60.0 | 60.0 | 66.7 | 66.7 | 54.5 | 54.5 |
| DEX0488_018.nt.1 | 79944 | 60.0 | 66.7 | 66.7 | 75.0 | 54.5 | 60.0 |
| DEX0488_018.nt.1 | 79944.1 | 65.0 | 65.0 | 66.7 | 66.7 | 63.6 | 63.6 |
| DEX0488_018.nt.2 | 79936 | 55.0 | 55.0 | 66.7 | 66.7 | 45.5 | 45.5 |
| DEX0488_018.nt.2 | 79936.1 | 60.0 | 60.0 | 66.7 | 66.7 | 54.5 | 54.5 |
| DEX0488_018.nt.2 | 79944 | 60.0 | 66.7 | 66.7 | 75.0 | 54.5 | 60.0 |
| DEX0488_018.nt.2 | 79944.1 | 65.0 | 65.0 | 66.7 | 66.7 | 63.6 | 63.6 |
| DEX0488_018.nt.3 | 79936 | 55.0 | 55.0 | 66.7 | 66.7 | 45.5 | 45.5 |
| DEX0488_018.nt.3 | 79936.1 | 60.0 | 60.0 | 66.7 | 66.7 | 54.5 | 54.5 |
| DEX0488_018.nt.3 | 79944 | 60.0 | 66.7 | 66.7 | 75.0 | 54.5 | 60.0 |
| DEX0488_018.nt.3 | 79944.1 | 65.0 | 65.0 | 66.7 | 66.7 | 63.6 | 63.6 |
| DEX0488_018.nt.4 | 79936 | 55.0 | 55.0 | 66.7 | 66.7 | 45.5 | 45.5 |
| DEX0488_018.nt.4 | 79936.1 | 60.0 | 60.0 | 66.7 | 66.7 | 54.5 | 54.5 |
| DEX0488_018.nt.4 | 79944 | 60.0 | 66.7 | 66.7 | 75.0 | 54.5 | 60.0 |
| DEX0488_018.nt.4 | 79944.1 | 65.0 | 65.0 | 66.7 | 66.7 | 63.6 | 63.6 |
| DEX0488_018.nt.5 | 79936 | 55.0 | 55.0 | 66.7 | 66.7 | 45.5 | 45.5 |
| DEX0488_018.nt.5 | 79936.1 | 60.0 | 60.0 | 66.7 | 66.7 | 54.5 | 54.5 |
| DEX0488_018.nt.5 | 79944 | 60.0 | 66.7 | 66.7 | 75.0 | 54.5 | 60.0 |
| DEX0488_018.nt.5 | 79944.1 | 65.0 | 65.0 | 66.7 | 66.7 | 63.6 | 63.6 |
| DEX0488_018.nt.6 | 79936 | 55.0 | 55.0 | 66.7 | 66.7 | 45.5 | 45.5 |
| DEX0488_018.nt.6 | 79936.1 | 60.0 | 60.0 | 66.7 | 66.7 | 54.5 | 54.5 |
| DEX0488_018.nt.6 | 79944 | 60.0 | 66.7 | 66.7 | 75.0 | 54.5 | 60.0 |
| DEX0488_018.nt.6 | 79944.1 | 65.0 | 65.0 | 66.7 | 66.7 | 63.6 | 63.6 |
| DEX0488_018.nt.7 | 79936 | 55.0 | 55.0 | 66.7 | 66.7 | 45.5 | 45.5 |
| DEX0488_018.nt.7 | 79936.1 | 60.0 | 60.0 | 66.7 | 66.7 | 54.5 | 54.5 |
| DEX0488_018.nt.7 | 79944 | 60.0 | 66.7 | 66.7 | 75.0 | 54.5 | 60.0 |
| DEX0488_018.nt.7 | 79944.1 | 65.0 | 65.0 | 66.7 | 66.7 | 63.6 | 63.6 |
| DEX0488_018.nt.8 | 79936 | 55.0 | 55.0 | 66.7 | 66.7 | 45.5 | 45.5 |
| DEX0488_018.nt.8 | 79936.1 | 60.0 | 60.0 | 66.7 | 66.7 | 54.5 | 54.5 |
| DEX0488_018.nt.8 | 79944 | 60.0 | 66.7 | 66.7 | 75.0 | 54.5 | 60.0 |
| DEX0488_018.nt.8 | 79944.1 | 65.0 | 65.0 | 66.7 | 66.7 | 63.6 | 63.6 |
| DEX0488_019.nt.1 | 79955 | 0.0 | 0.0 | 0.0 | 0.0 | 0.0 | 0.0 |
| DEX0488_019.nt.1 | 79955.1 | 5.0 | 5.0 | 0.0 | 0.0 | 9.1 | 9.1 |
| DEX0488_019.nt.1 | 79956 | 10.0 | 10.0 | 11.1 | 11.1 | 9.1 | 9.1 |
| DEX0488_019.nt.1 | 79956.1 | 10.0 | 10.0 | 11.1 | 11.1 | 9.1 | 9.1 |
| DEX0488_019.nt.1 | 79959 | 10.0 | 10.0 | 0.0 | 0.0 | 18.2 | 18.2 |
| DEX0488_019.nt.1 | 79959.1 | 10.0 | 10.0 | 11.1 | 11.1 | 9.1 | 9.1 |
| DEX0488_019.nt.1 | 79960 | 15.0 | 15.0 | 11.1 | 11.1 | 18.2 | 18.2 |
| DEX0488_019.nt.1 | 79960.1 | 10.0 | 12.5 | 0.0 | 0.0 | 18.2 | 25.0 |
| DEX0488_019.nt.1 | 79963 | 5.0 | 5.3 | 0.0 | 0.0 | 9.1 | 10.0 |
| DEX0488_019.nt.1 | 79963.1 | 10.0 | 10.0 | 22.2 | 22.2 | 0.0 | 0.0 |
| DEX0488_019.nt.1 | 79964 | 0.0 | 0.0 | 0.0 | 0.0 | 0.0 | 0.0 |
| DEX0488_019.nt.1 | 79964.1 | 5.0 | 5.0 | 0.0 | 0.0 | 9.1 | 9.1 |
| DEX0488_019.nt.2 | 79955 | 0.0 | 0.0 | 0.0 | 0.0 | 0.0 | 0.0 |
| DEX0488_019.nt.2 | 79955.1 | 5.0 | 5.0 | 0.0 | 0.0 | 9.1 | 9.1 |
| DEX0488_019.nt.2 | 79956 | 10.0 | 10.0 | 11.1 | 11.1 | 9.1 | 9.1 |
| DEX0488_019.nt.2 | 79956.1 | 10.0 | 10.0 | 11.1 | 11.1 | 9.1 | 9.1 |
| DEX0488_019.nt.2 | 79959 | 10.0 | 10.0 | 0.0 | 0.0 | 18.2 | 18.2 |
| DEX0488_019.nt.2 | 79959.1 | 10.0 | 10.0 | 11.1 | 11.1 | 9.1 | 9.1 |
| DEX0488_019.nt.2 | 79960 | 15.0 | 15.0 | 11.1 | 11.1 | 18.2 | 18.2 |
| DEX0488_019.nt.2 | 79960.1 | 10.0 | 12.5 | 0.0 | 0.0 | 18.2 | 25.0 |
| DEX0488_019.nt.2 | 79963 | 5.0 | 5.3 | 0.0 | 0.0 | 9.1 | 10.0 |
| DEX0488_019.nt.2 | 79963.1 | 10.0 | 10.0 | 22.2 | 22.2 | 0.0 | 0.0 |
| DEX0488_019.nt.2 | 79964 | 0.0 | 0.0 | 0.0 | 0.0 | 0.0 | 0.0 |
| DEX0488_019.nt.2 | 79964.1 | 5.0 | 5.0 | 0.0 | 0.0 | 9.1 | 9.1 |
| DEX0488_019.nt.3 | 79955 | 0.0 | 0.0 | 0.0 | 0.0 | 0.0 | 0.0 |
| DEX0488_019.nt.3 | 79955.1 | 5.0 | 5.0 | 0.0 | 0.0 | 9.1 | 9.1 |
| DEX0488_019.nt.3 | 79956 | 10.0 | 10.0 | 11.1 | 11.1 | 9.1 | 9.1 |
| DEX0488_019.nt.3 | 79956.1 | 10.0 | 10.0 | 11.1 | 11.1 | 9.1 | 9.1 |
| DEX0488_019.nt.3 | 79959 | 10.0 | 10.0 | 0.0 | 0.0 | 18.2 | 18.2 |
| DEX0488_019.nt.3 | 79959.1 | 10.0 | 10.0 | 11.1 | 11.1 | 9.1 | 9.1 |
| DEX0488_019.nt.3 | 79960 | 15.0 | 15.0 | 11.1 | 11.1 | 18.2 | 18.2 |
| DEX0488_019.nt.3 | 79960.1 | 10.0 | 12.5 | 0.0 | 0.0 | 18.2 | 25.0 |
| DEX0488_019.nt.3 | 79963 | 5.0 | 5.3 | 0.0 | 0.0 | 9.1 | 10.0 |
| DEX0488_019.nt.3 | 79963.1 | 10.0 | 10.0 | 22.2 | 22.2 | 0.0 | 0.0 |
| DEX0488_019.nt.3 | 79964 | 0.0 | 0.0 | 0.0 | 0.0 | 0.0 | 0.0 |
| DEX0488_019.nt.3 | 79964.1 | 5.0 | 5.0 | 0.0 | 0.0 | 9.1 | 9.1 |
| DEX0488_019.nt.4 | 79955 | 0.0 | 0.0 | 0.0 | 0.0 | 0.0 | 0.0 |
| DEX0488_019.nt.4 | 79955.1 | 5.0 | 5.0 | 0.0 | 0.0 | 9.1 | 9.1 |
| DEX0488_019.nt.4 | 79956 | 10.0 | 10.0 | 11.1 | 11.1 | 9.1 | 9.1 |
| DEX0488_019.nt.4 | 79956.1 | 10.0 | 10.0 | 11.1 | 11.1 | 9.1 | 9.1 |
| DEX0488_019.nt.4 | 79959 | 10.0 | 10.0 | 0.0 | 0.0 | 18.2 | 18.2 |
| DEX0488_019.nt.4 | 79959.1 | 10.0 | 10.0 | 11.1 | 11.1 | 9.1 | 9.1 |
| DEX0488_019.nt.4 | 79960 | 15.0 | 15.0 | 11.1 | 11.1 | 18.2 | 18.2 |
| DEX0488_019.nt.4 | 79960.1 | 10.0 | 12.5 | 0.0 | 0.0 | 18.2 | 25.0 |
| DEX0488_019.nt.4 | 79963 | 5.0 | 5.3 | 0.0 | 0.0 | 9.1 | 10.0 |
| DEX0488_019.nt.4 | 79963.1 | 10.0 | 10.0 | 22.2 | 22.2 | 0.0 | 0.0 |
| DEX0488_019.nt.4 | 79964 | 0.0 | 0.0 | 0.0 | 0.0 | 0.0 | 0.0 |
| DEX0488_019.nt.4 | 79964.1 | 5.0 | 5.0 | 0.0 | 0.0 | 9.1 | 9.1 |
| DEX0488_019.nt.5 | 79959 | 10.0 | 10.0 | 0.0 | 0.0 | 18.2 | 18.2 |
| DEX0488_019.nt.5 | 79959.1 | 10.0 | 10.0 | 11.1 | 11.1 | 9.1 | 9.1 |
| DEX0488_019.nt.5 | 79960 | 15.0 | 15.0 | 11.1 | 11.1 | 18.2 | 18.2 |
| DEX0488_019.nt.5 | 79960.1 | 10.0 | 12.5 | 0.0 | 0.0 | 18.2 | 25.0 |
| DEX0488_019.nt.6 | 79955 | 0.0 | 0.0 | 0.0 | 0.0 | 0.0 | 0.0 |
| DEX0488_019.nt.6 | 79955.1 | 5.0 | 5.0 | 0.0 | 0.0 | 9.1 | 9.1 |
| DEX0488_019.nt.6 | 79956 | 10.0 | 10.0 | 11.1 | 11.1 | 9.1 | 9.1 |
| DEX0488_019.nt.6 | 79956.1 | 10.0 | 10.0 | 11.1 | 11.1 | 9.1 | 9.1 |
| DEX0488_019.nt.6 | 79959 | 10.0 | 10.0 | 0.0 | 0.0 | 18.2 | 18.2 |
| DEX0488_019.nt.6 | 79959.1 | 10.0 | 10.0 | 11.1 | 11.1 | 9.1 | 9.1 |
| DEX0488_019.nt.6 | 79960 | 15.0 | 15.0 | 11.1 | 11.1 | 18.2 | 18.2 |
| DEX0488_019.nt.6 | 79960.1 | 10.0 | 12.5 | 0.0 | 0.0 | 18.2 | 25.0 |
| DEX0488_019.nt.6 | 79963 | 5.0 | 5.3 | 0.0 | 0.0 | 9.1 | 10.0 |
| DEX0488_019.nt.6 | 79963.1 | 10.0 | 10.0 | 22.2 | 22.2 | 0.0 | 0.0 |
| DEX0488_019.nt.6 | 79964 | 0.0 | 0.0 | 0.0 | 0.0 | 0.0 | 0.0 |
| DEX0488_019.nt.6 | 79964.1 | 5.0 | 5.0 | 0.0 | 0.0 | 9.1 | 9.1 |
| DEX0488_019.nt.7 | 79955 | 0.0 | 0.0 | 0.0 | 0.0 | 0.0 | 0.0 |
| DEX0488_019.nt.7 | 79955.1 | 5.0 | 5.0 | 0.0 | 0.0 | 9.1 | 9.1 |
| DEX0488_019.nt.7 | 79956 | 10.0 | 10.0 | 11.1 | 11.1 | 9.1 | 9.1 |
| DEX0488_019.nt.7 | 79956.1 | 10.0 | 10.0 | 11.1 | 11.1 | 9.1 | 9.1 |
| DEX0488_019.nt.7 | 79959 | 10.0 | 10.0 | 0.0 | 0.0 | 18.2 | 18.2 |
| DEX0488_019.nt.7 | 79959.1 | 10.0 | 10.0 | 11.1 | 11.1 | 9.1 | 9.1 |
| DEX0488_019.nt.7 | 79960 | 15.0 | 15.0 | 11.1 | 11.1 | 18.2 | 18.2 |
| DEX0488_019.nt.7 | 79960.1 | 10.0 | 12.5 | 0.0 | 0.0 | 18.2 | 25.0 |
| DEX0488_019.nt.7 | 79963 | 5.0 | 5.3 | 0.0 | 0.0 | 9.1 | 10.0 |
| DEX0488_019.nt.7 | 79963.1 | 10.0 | 10.0 | 22.2 | 22.2 | 0.0 | 0.0 |
| DEX0488_019.nt.7 | 79964 | 0.0 | 0.0 | 0.0 | 0.0 | 0.0 | 0.0 |
| DEX0488_019.nt.7 | 79964.1 | 5.0 | 5.0 | 0.0 | 0.0 | 9.1 | 9.1 |
| DEX0488_019.nt.8 | 79955 | 0.0 | 0.0 | 0.0 | 0.0 | 0.0 | 0.0 |
| DEX0488_019.nt.8 | 79955.1 | 5.0 | 5.0 | 0.0 | 0.0 | 9.1 | 9.1 |
| DEX0488_019.nt.8 | 79956 | 10.0 | 10.0 | 11.1 | 11.1 | 9.1 | 9.1 |
| DEX0488_019.nt.8 | 79956.1 | 10.0 | 10.0 | 11.1 | 11.1 | 9.1 | 9.1 |
| DEX0488_019.nt.8 | 79959 | 10.0 | 10.0 | 0.0 | 0.0 | 18.2 | 18.2 |
| DEX0488_019.nt.8 | 79959.1 | 10.0 | 10.0 | 11.1 | 11.1 | 9.1 | 9.1 |
| DEX0488_019.nt.8 | 79960 | 15.0 | 15.0 | 11.1 | 11.1 | 18.2 | 18.2 |
| DEX0488_019.nt.8 | 79960.1 | 10.0 | 12.5 | 0.0 | 0.0 | 18.2 | 25.0 |
| DEX0488_019.nt.8 | 79963 | 5.0 | 5.3 | 0.0 | 0.0 | 9.1 | 10.0 |
| DEX0488_019.nt.8 | 79963.1 | 10.0 | 10.0 | 22.2 | 22.2 | 0.0 | 0.0 |
| DEX0488_019.nt.8 | 79964 | 0.0 | 0.0 | 0.0 | 0.0 | 0.0 | 0.0 |
| DEX0488_019.nt.8 | 79964.1 | 5.0 | 5.0 | 0.0 | 0.0 | 9.1 | 9.1 |
| DEX0488_020.nt.1 | 77771 | 20.0 | 25.0 | 11.1 | 14.3 | 27.3 | 33.3 |
| DEX0488_020.nt.1 | 77771.1 | 20.0 | 25.0 | 11.1 | 14.3 | 27.3 | 33.3 |
| DEX0488_020.nt.1 | 77772 | 20.0 | 26.7 | 11.1 | 16.7 | 27.3 | 33.3 |
| DEX0488_020.nt.1 | 77772.1 | 20.0 | 33.3 | 11.1 | 20.0 | 27.3 | 42.9 |
| DEX0488_021.nt.1 | 21187 | 40.0 | 40.0 | 77.8 | 77.8 | 9.1 | 9.1 |
| DEX0488_021.nt.1 | 21187.1 | 40.0 | 42.1 | 77.8 | 77.8 | 9.1 | 10.0 |
| DEX0488_021.nt.1 | 78927 | 55.0 | 57.9 | 88.9 | 88.9 | 27.3 | 30.0 |
| DEX0488_021.nt.1 | 78927.1 | 65.0 | 68.4 | 88.9 | 88.9 | 45.5 | 50.0 |
| DEX0488_021.nt.1 | 78928 | 0.0 | 0.0 | 0.0 | 0.0 | 0.0 | 0.0 |
| DEX0488_021.nt.1 | 78928.1 | 0.0 | 0.0 | 0.0 | 0.0 | 0.0 | 0.0 |
| DEX0488_021.nt.2 | 21187 | 40.0 | 40.0 | 77.8 | 77.8 | 9.1 | 9.1 |
| DEX0488_021.nt.2 | 21187.1 | 40.0 | 42.1 | 77.8 | 77.8 | 9.1 | 10.0 |
| DEX0488_021.nt.2 | 78927 | 55.0 | 57.9 | 88.9 | 88.9 | 27.3 | 30.0 |
| DEX0488_021.nt.2 | 78927.1 | 65.0 | 68.4 | 88.9 | 88.9 | 45.5 | 50.0 |
| DEX0488_021.nt.2 | 78928 | 0.0 | 0.0 | 0.0 | 0.0 | 0.0 | 0.0 |
| DEX0488_021.nt.2 | 78928.1 | 0.0 | 0.0 | 0.0 | 0.0 | 0.0 | 0.0 |
| DEX0488_022.nt.1 | 79699 | 10.0 | 10.0 | 22.2 | 22.2 | 0.0 | 0.0 |
| DEX0488_022.nt.1 | 79699.1 | 20.0 | 20.0 | 44.4 | 44.4 | 0.0 | 0.0 |
| DEX0488_022.nt.1 | 79700 | 10.0 | 10.0 | 22.2 | 22.2 | 0.0 | 0.0 |
| DEX0488_022.nt.1 | 79700.1 | 15.0 | 15.0 | 33.3 | 33.3 | 0.0 | 0.0 |
| DEX0488_022.nt.2 | 79699 | 10.0 | 10.0 | 22.2 | 22.2 | 0.0 | 0.0 |
| DEX0488_022.nt.2 | 79699.1 | 20.0 | 20.0 | 44.4 | 44.4 | 0.0 | 0.0 |
| DEX0488_022.nt.2 | 79700 | 10.0 | 10.0 | 22.2 | 22.2 | 0.0 | 0.0 |
| DEX0488_022.nt.2 | 79700.1 | 15.0 | 15.0 | 33.3 | 33.3 | 0.0 | 0.0 |
| DEX0488_022.nt.3 | 79699 | 10.0 | 10.0 | 22.2 | 22.2 | 0.0 | 0.0 |
| DEX0488_022.nt.3 | 79699.1 | 20.0 | 20.0 | 44.4 | 44.4 | 0.0 | 0.0 |
| DEX0488_022.nt.3 | 79700 | 10.0 | 10.0 | 22.2 | 22.2 | 0.0 | 0.0 |
| DEX0488_022.nt.3 | 79700.1 | 15.0 | 15.0 | 33.3 | 33.3 | 0.0 | 0.0 |
| DEX0488_022.nt.4 | 79699 | 10.0 | 10.0 | 22.2 | 22.2 | 0.0 | 0.0 |
| DEX0488_022.nt.4 | 79699.1 | 20.0 | 20.0 | 44.4 | 44.4 | 0.0 | 0.0 |
| DEX0488_022.nt.4 | 79700 | 10.0 | 10.0 | 22.2 | 22.2 | 0.0 | 0.0 |
| DEX0488_022.nt.4 | 79700.1 | 15.0 | 15.0 | 33.3 | 33.3 | 0.0 | 0.0 |
| DEX0488_022.nt.5 | 79699 | 10.0 | 10.0 | 22.2 | 22.2 | 0.0 | 0.0 |
| DEX0488_022.nt.5 | 79699.1 | 20.0 | 20.0 | 44.4 | 44.4 | 0.0 | 0.0 |
| DEX0488_022.nt.5 | 79700 | 10.0 | 10.0 | 22.2 | 22.2 | 0.0 | 0.0 |
| DEX0488_022.nt.5 | 79700.1 | 15.0 | 15.0 | 33.3 | 33.3 | 0.0 | 0.0 |
| DEX0488_022.nt.6 | 79699 | 10.0 | 10.0 | 22.2 | 22.2 | 0.0 | 0.0 |
| DEX0488_022.nt.6 | 79699.1 | 20.0 | 20.0 | 44.4 | 44.4 | 0.0 | 0.0 |
| DEX0488_022.nt.6 | 79700 | 10.0 | 10.0 | 22.2 | 22.2 | 0.0 | 0.0 |
| DEX0488_022.nt.6 | 79700.1 | 15.0 | 15.0 | 33.3 | 33.3 | 0.0 | 0.0 |
| DEX0488_022.nt.7 | 79699 | 10.0 | 10.0 | 22.2 | 22.2 | 0.0 | 0.0 |
| DEX0488_022.nt.7 | 79699.1 | 20.0 | 20.0 | 44.4 | 44.4 | 0.0 | 0.0 |
| DEX0488_022.nt.7 | 79700 | 10.0 | 10.0 | 22.2 | 22.2 | 0.0 | 0.0 |
| DEX0488_022.nt.7 | 79700.1 | 15.0 | 15.0 | 33.3 | 33.3 | 0.0 | 0.0 |
| DEX0488_022.nt.8 | 79699 | 10.0 | 10.0 | 22.2 | 22.2 | 0.0 | 0.0 |
| DEX0488_022.nt.8 | 79699.1 | 20.0 | 20.0 | 44.4 | 44.4 | 0.0 | 0.0 |
| DEX0488_022.nt.8 | 79700 | 10.0 | 10.0 | 22.2 | 22.2 | 0.0 | 0.0 |
| DEX0488_022.nt.8 | 79700.1 | 15.0 | 15.0 | 33.3 | 33.3 | 0.0 | 0.0 |
| DEX0488_023.nt.1 | 78715 | 40.0 | 40.0 | 33.3 | 33.3 | 45.5 | 45.5 |
| DEX0488_023.nt.1 | 78715.1 | 40.0 | 42.1 | 33.3 | 33.3 | 45.5 | 50.0 |
| DEX0488_023.nt.1 | 78716 | 45.0 | 45.0 | 33.3 | 33.3 | 54.5 | 54.5 |
| DEX0488_023.nt.1 | 78716.1 | 40.0 | 40.0 | 33.3 | 33.3 | 45.5 | 45.5 |
| DEX0488_023.nt.2 | 78715 | 40.0 | 40.0 | 33.3 | 33.3 | 45.5 | 45.5 |
| DEX0488_023.nt.2 | 78715.1 | 40.0 | 42.1 | 33.3 | 33.3 | 45.5 | 50.0 |
| DEX0488_023.nt.2 | 78716 | 45.0 | 45.0 | 33.3 | 33.3 | 54.5 | 54.5 |
| DEX0488_023.nt.2 | 78716.1 | 40.0 | 40.0 | 33.3 | 33.3 | 45.5 | 45.5 |
| DEX0488_024.nt.1 | 79699 | 10.0 | 10.0 | 22.2 | 22.2 | 0.0 | 0.0 |
| DEX0488_024.nt.1 | 79699.1 | 20.0 | 20.0 | 44.4 | 44.4 | 0.0 | 0.0 |
| DEX0488_024.nt.1 | 79700 | 10.0 | 10.0 | 22.2 | 22.2 | 0.0 | 0.0 |
| DEX0488_024.nt.1 | 79700.1 | 15.0 | 15.0 | 33.3 | 33.3 | 0.0 | 0.0 |
| DEX0488_024.nt.2 | 79699 | 10.0 | 10.0 | 22.2 | 22.2 | 0.0 | 0.0 |
| DEX0488_024.nt.2 | 79699.1 | 20.0 | 20.0 | 44.4 | 44.4 | 0.0 | 0.0 |
| DEX0488_024.nt.2 | 79700 | 10.0 | 10.0 | 22.2 | 22.2 | 0.0 | 0.0 |
| DEX0488_024.nt.2 | 79700.1 | 15.0 | 15.0 | 33.3 | 33.3 | 0.0 | 0.0 |
| DEX0488_025.nt.1 | 90527 | 0.0 | 0.0 | 0.0 | 0.0 | 0.0 | 0.0 |
| DEX0488_025.nt.1 | 90527.1 | 0.0 | 0.0 | 0.0 | 0.0 | 0.0 | 0.0 |
| DEX0488_025.nt.1 | 90528 | 10.0 | 10.0 | 22.2 | 22.2 | 0.0 | 0.0 |
| DEX0488_025.nt.1 | 90528.1 | 5.0 | 5.0 | 11.1 | 11.1 | 0.0 | 0.0 |
| DEX0488_025.nt.1 | 90543 | 0.0 | 0.0 | 0.0 | 0.0 | 0.0 | 0.0 |
| DEX0488_025.nt.1 | 90543.1 | 0.0 | 0.0 | 0.0 | 0.0 | 0.0 | 0.0 |
| DEX0488_025.nt.1 | 90544 | 5.0 | 5.0 | 11.1 | 11.1 | 0.0 | 0.0 |
| DEX0488_025.nt.1 | 90544.1 | 10.0 | 10.5 | 22.2 | 22.2 | 0.0 | 0.0 |
| DEX0488_025.nt.1 | 91047 | 0.0 | 0.0 | 0.0 | 0.0 | 0.0 | 0.0 |
| DEX0488_025.nt.1 | 91047.1 | 0.0 | 0.0 | 0.0 | 0.0 | 0.0 | 0.0 |
| DEX0488_025.nt.1 | 91048 | 0.0 | 0.0 | 0.0 | 0.0 | 0.0 | 0.0 |
| DEX0488_025.nt.1 | 91048.1 | 0.0 | 0.0 | 0.0 | 0.0 | 0.0 | 0.0 |
| DEX0488_025.nt.1 | 91051 | 0.0 | 0.0 | 0.0 | 0.0 | 0.0 | 0.0 |
| DEX0488_025.nt.1 | 91051.1 | 0.0 | 0.0 | 0.0 | 0.0 | 0.0 | 0.0 |
| DEX0488_025.nt.1 | 91052 | 0.0 | 0.0 | 0.0 | 0.0 | 0.0 | 0.0 |
| DEX0488_025.nt.1 | 91052.1 | 0.0 | 0.0 | 0.0 | 0.0 | 0.0 | 0.0 |
| DEX0488_025.nt.1 | 91055 | 0.0 | 0.0 | 0.0 | 0.0 | 0.0 | 0.0 |
| DEX0488_025.nt.1 | 91055.1 | 0.0 | 0.0 | 0.0 | 0.0 | 0.0 | 0.0 |
| DEX0488_025.nt.1 | 91056 | 0.0 | 0.0 | 0.0 | 0.0 | 0.0 | 0.0 |
| DEX0488_025.nt.1 | 91056.1 | 0.0 | 0.0 | 0.0 | 0.0 | 0.0 | 0.0 |
| DEX0488_025.nt.1 | 91171 | 0.0 | 0.0 | 0.0 | 0.0 | 0.0 | 0.0 |
| DEX0488_025.nt.1 | 91171.1 | 0.0 | 0.0 | 0.0 | 0.0 | 0.0 | 0.0 |
| DEX0488_025.nt.1 | 91172 | 10.0 | 10.0 | 22.2 | 22.2 | 0.0 | 0.0 |
| DEX0488_025.nt.1 | 91172.1 | 5.0 | 5.9 | 11.1 | 11.1 | 0.0 | 0.0 |
| DEX0488_025.nt.1 | 91271 | 0.0 | 0.0 | 0.0 | 0.0 | 0.0 | 0.0 |
| DEX0488_025.nt.1 | 91271.1 | 0.0 | 0.0 | 0.0 | 0.0 | 0.0 | 0.0 |
| DEX0488_025.nt.1 | 91272 | 5.0 | 5.0 | 11.1 | 11.1 | 0.0 | 0.0 |
| DEX0488_025.nt.1 | 91272.1 | 5.0 | 5.0 | 11.1 | 11.1 | 0.0 | 0.0 |
| DEX0488_025.nt.1 | 91275 | 0.0 | 0.0 | 0.0 | 0.0 | 0.0 | 0.0 |
| DEX0488_025.nt.1 | 91275.1 | 0.0 | 0.0 | 0.0 | 0.0 | 0.0 | 0.0 |
| DEX0488_025.nt.1 | 91276 | 15.0 | 15.0 | 22.2 | 22.2 | 9.1 | 9.1 |
| DEX0488_025.nt.1 | 91276.1 | 15.0 | 15.0 | 33.3 | 33.3 | 0.0 | 0.0 |
| DEX0488_025.nt.2 | 90528 | 10.0 | 10.0 | 22.2 | 22.2 | 0.0 | 0.0 |
| DEX0488_025.nt.2 | 90528.1 | 5.0 | 5.0 | 11.1 | 11.1 | 0.0 | 0.0 |
| DEX0488_025.nt.2 | 90544 | 5.0 | 5.0 | 11.1 | 11.1 | 0.0 | 0.0 |
| DEX0488_025.nt.2 | 90544.1 | 10.0 | 10.5 | 22.2 | 22.2 | 0.0 | 0.0 |
| DEX0488_025.nt.2 | 91172 | 10.0 | 10.0 | 22.2 | 22.2 | 0.0 | 0.0 |
| DEX0488_025.nt.2 | 91172.1 | 5.0 | 5.9 | 11.1 | 11.1 | 0.0 | 0.0 |
| DEX0488_025.nt.2 | 91272 | 5.0 | 5.0 | 11.1 | 11.1 | 0.0 | 0.0 |
| DEX0488_025.nt.2 | 91272.1 | 5.0 | 5.0 | 11.1 | 11.1 | 0.0 | 0.0 |
| DEX0488_025.nt.2 | 91276 | 15.0 | 15.0 | 22.2 | 22.2 | 9.1 | 9.1 |
| DEX0488_025.nt.2 | 91276.1 | 15.0 | 15.0 | 33.3 | 33.3 | 0.0 | 0.0 |
| DEX0488_026.nt.1 | 24160 | 5.0 | 12.5 | 0.0 | 0.0 | 9.1 | 20.0 |
| DEX0488_026.nt.1 | 24160.1 | 5.0 | 12.5 | 0.0 | 0.0 | 9.1 | 20.0 |
| DEX0488_026.nt.1 | 24160.2 | 5.0 | 11.1 | 0.0 | 0.0 | 9.1 | 16.7 |
| DEX0488_026.nt.1 | 24160.3 | 5.0 | 16.7 | 0.0 | 0.0 | 9.1 | 25.0 |
| DEX0488_026.nt.1 | 26816 | 5.0 | 12.5 | 0.0 | 0.0 | 9.1 | 16.7 |
| DEX0488_026.nt.1 | 26816.1 | 5.0 | 14.3 | 0.0 | 0.0 | 9.1 | 20.0 |
| DEX0488_027.nt.1 | 17852 | 10.0 | 20.0 | 22.2 | 50.0 | 0.0 | 0.0 |
| DEX0488_027.nt.1 | 17852.1 | 5.0 | 8.3 | 11.1 | 20.0 | 0.0 | 0.0 |
| DEX0488_027.nt.1 | 17853 | 10.0 | 25.0 | 22.2 | 66.7 | 0.0 | 0.0 |
| DEX0488_027.nt.1 | 17853.1 | 10.0 | 33.3 | 22.2 | 50.0 | 0.0 | 0.0 |
| DEX0488_027.nt.1 | 18644 | 5.0 | 9.1 | 11.1 | 20.0 | 0.0 | 0.0 |
| DEX0488_027.nt.1 | 18644.1 | 5.0 | 8.3 | 11.1 | 20.0 | 0.0 | 0.0 |
| DEX0488_027.nt.1 | 18644.2 | 0.0 | 0.0 | 0.0 | 0.0 | 0.0 | 0.0 |
| DEX0488_027.nt.1 | 18644.3 | 5.0 | 9.1 | 11.1 | 20.0 | 0.0 | 0.0 |
| DEX0488_027.nt.1 | 18645 | 10.0 | 33.3 | 22.2 | 66.7 | 0.0 | 0.0 |
| DEX0488_027.nt.1 | 18645.1 | 10.0 | 28.6 | 22.2 | 66.7 | 0.0 | 0.0 |
| DEX0488_027.nt.1 | 18645.2 | 10.0 | 28.6 | 22.2 | 66.7 | 0.0 | 0.0 |
| DEX0488_027.nt.1 | 18645.3 | 10.0 | 20.0 | 22.2 | 66.7 | 0.0 | 0.0 |
| DEX0488_027.nt.1 | 41955 | 5.0 | 10.0 | 11.1 | 25.0 | 0.0 | 0.0 |
| DEX0488_027.nt.1 | 41955.1 | 5.0 | 9.1 | 11.1 | 25.0 | 0.0 | 0.0 |
| DEX0488_027.nt.1 | 41955.2 | 5.0 | 9.1 | 11.1 | 25.0 | 0.0 | 0.0 |
| DEX0488_027.nt.1 | 41955.3 | 10.0 | 22.2 | 22.2 | 50.0 | 0.0 | 0.0 |
| DEX0488_027.nt.1 | 41955.4 | 5.0 | 10.0 | 11.1 | 33.3 | 0.0 | 0.0 |
| DEX0488_027.nt.1 | 41956 | 5.0 | 9.1 | 11.1 | 25.0 | 0.0 | 0.0 |
| DEX0488_027.nt.1 | 41956.1 | 5.0 | 11.1 | 11.1 | 25.0 | 0.0 | 0.0 |
| DEX0488_027.nt.1 | 41956.2 | 5.0 | 9.1 | 11.1 | 25.0 | 0.0 | 0.0 |
| DEX0488_027.nt.1 | 41956.3 | 5.0 | 10.0 | 11.1 | 25.0 | 0.0 | 0.0 |
| DEX0488_027.nt.1 | 41956.4 | 10.0 | 15.4 | 22.2 | 40.0 | 0.0 | 0.0 |
| DEX0488_027.nt.2 | 17852 | 10.0 | 20.0 | 22.2 | 50.0 | 0.0 | 0.0 |
| DEX0488_027.nt.2 | 17852.1 | 5.0 | 8.3 | 11.1 | 20.0 | 0.0 | 0.0 |
| DEX0488_027.nt.2 | 17853 | 10.0 | 25.0 | 22.2 | 66.7 | 0.0 | 0.0 |
| DEX0488_027.nt.2 | 17853.1 | 10.0 | 33.3 | 22.2 | 50.0 | 0.0 | 0.0 |
| DEX0488_027.nt.2 | 18644 | 5.0 | 9.1 | 11.1 | 20.0 | 0.0 | 0.0 |
| DEX0488_027.nt.2 | 18644.1 | 5.0 | 8.3 | 11.1 | 20.0 | 0.0 | 0.0 |
| DEX0488_027.nt.2 | 18644.2 | 0.0 | 0.0 | 0.0 | 0.0 | 0.0 | 0.0 |
| DEX0488_027.nt.2 | 18644.3 | 5.0 | 9.1 | 11.1 | 20.0 | 0.0 | 0.0 |
| DEX0488_027.nt.2 | 18645 | 10.0 | 33.3 | 22.2 | 66.7 | 0.0 | 0.0 |
| DEX0488_027.nt.2 | 18645.1 | 10.0 | 28.6 | 22.2 | 66.7 | 0.0 | 0.0 |
| DEX0488_027.nt.2 | 18645.2 | 10.0 | 28.6 | 22.2 | 66.7 | 0.0 | 0.0 |
| DEX0488_027.nt.2 | 18645.3 | 10.0 | 20.0 | 22.2 | 66.7 | 0.0 | 0.0 |
| DEX0488_027.nt.3 | 17852 | 10.0 | 20.0 | 22.2 | 50.0 | 0.0 | 0.0 |
| DEX0488_027.nt.3 | 17852.1 | 5.0 | 8.3 | 11.1 | 20.0 | 0.0 | 0.0 |
| DEX0488_027.nt.3 | 17853 | 10.0 | 25.0 | 22.2 | 66.7 | 0.0 | 0.0 |
| DEX0488_027.nt.3 | 17853.1 | 10.0 | 33.3 | 22.2 | 50.0 | 0.0 | 0.0 |
| DEX0488_027.nt.3 | 18644 | 5.0 | 9.1 | 11.1 | 20.0 | 0.0 | 0.0 |
| DEX0488_027.nt.3 | 18644.1 | 5.0 | 8.3 | 11.1 | 20.0 | 0.0 | 0.0 |
| DEX0488_027.nt.3 | 18644.2 | 0.0 | 0.0 | 0.0 | 0.0 | 0.0 | 0.0 |
| DEX0488_027.nt.3 | 18644.3 | 5.0 | 9.1 | 11.1 | 20.0 | 0.0 | 0.0 |
| DEX0488_027.nt.3 | 18645 | 10.0 | 33.3 | 22.2 | 66.7 | 0.0 | 0.0 |
| DEX0488_027.nt.3 | 18645.1 | 10.0 | 28.6 | 22.2 | 66.7 | 0.0 | 0.0 |
| DEX0488_027.nt.3 | 18645.2 | 10.0 | 28.6 | 22.2 | 66.7 | 0.0 | 0.0 |
| DEX0488_027.nt.3 | 18645.3 | 10.0 | 20.0 | 22.2 | 66.7 | 0.0 | 0.0 |
| DEX0488_027.nt.4 | 17852 | 10.0 | 20.0 | 22.2 | 50.0 | 0.0 | 0.0 |
| DEX0488_027.nt.4 | 17852.1 | 5.0 | 8.3 | 11.1 | 20.0 | 0.0 | 0.0 |
| DEX0488_027.nt.4 | 17853 | 10.0 | 25.0 | 22.2 | 66.7 | 0.0 | 0.0 |
| DEX0488_027.nt.4 | 17853.1 | 10.0 | 33.3 | 22.2 | 50.0 | 0.0 | 0.0 |
| DEX0488_027.nt.4 | 18644 | 5.0 | 9.1 | 11.1 | 20.0 | 0.0 | 0.0 |
| DEX0488_027.nt.4 | 18644.1 | 5.0 | 8.3 | 11.1 | 20.0 | 0.0 | 0.0 |
| DEX0488_027.nt.4 | 18644.2 | 0.0 | 0.0 | 0.0 | 0.0 | 0.0 | 0.0 |
| DEX0488_027.nt.4 | 18644.3 | 5.0 | 9.1 | 11.1 | 20.0 | 0.0 | 0.0 |
| DEX0488_027.nt.4 | 18645 | 10.0 | 33.3 | 22.2 | 66.7 | 0.0 | 0.0 |
| DEX0488_027.nt.4 | 18645.1 | 10.0 | 28.6 | 22.2 | 66.7 | 0.0 | 0.0 |
| DEX0488_027.nt.4 | 18645.2 | 10.0 | 28.6 | 22.2 | 66.7 | 0.0 | 0.0 |
| DEX0488_027.nt.4 | 18645.3 | 10.0 | 20.0 | 22.2 | 66.7 | 0.0 | 0.0 |
| DEX0488_028.nt.1 | 33088 | 70.0 | 70.0 | 55.6 | 55.6 | 81.8 | 81.8 |
| DEX0488_028.nt.1 | 33088.1 | 70.0 | 70.0 | 55.6 | 55.6 | 81.8 | 81.8 |
| DEX0488_028.nt.1 | 33088.2 | 70.0 | 77.8 | 55.6 | 71.4 | 81.8 | 81.8 |
| DEX0488_028.nt.1 | 33088.3 | 70.0 | 77.8 | 55.6 | 71.4 | 81.8 | 81.8 |
| DEX0488_029.nt.1 | 79635 | 75.0 | 75.0 | 77.8 | 77.8 | 72.7 | 72.7 |
| DEX0488_029.nt.1 | 79635.1 | 75.0 | 75.0 | 66.7 | 66.7 | 81.8 | 81.8 |
| DEX0488_030.nt.1 | 35317 | 5.0 | 7.1 | 11.1 | 20.0 | 0.0 | 0.0 |
| DEX0488_030.nt.1 | 35317.1 | 5.0 | 7.1 | 11.1 | 20.0 | 0.0 | 0.0 |
| DEX0488_031.nt.1 | 78587 | 30.0 | 30.0 | 44.4 | 44.4 | 18.2 | 18.2 |
| DEX0488_031.nt.1 | 78587.1 | 30.0 | 30.0 | 44.4 | 44.4 | 18.2 | 18.2 |
| DEX0488_031.nt.1 | 78588 | 35.0 | 35.0 | 44.4 | 44.4 | 27.3 | 27.3 |
| DEX0488_031.nt.1 | 78588.1 | 30.0 | 30.0 | 44.4 | 44.4 | 18.2 | 18.2 |
| DEX0488_032.nt.1 | 78711 | 5.0 | 5.0 | 0.0 | 0.0 | 9.1 | 9.1 |
| DEX0488_032.nt.1 | 78711.1 | 5.0 | 5.0 | 0.0 | 0.0 | 9.1 | 9.1 |
| DEX0488_032.nt.1 | 78712 | 5.0 | 5.0 | 0.0 | 0.0 | 9.1 | 9.1 |
| DEX0488_032.nt.1 | 78712.1 | 5.0 | 5.0 | 0.0 | 0.0 | 9.1 | 9.1 |
| DEX0488_033.nt.1 | 79019 | 5.0 | 5.0 | 11.1 | 11.1 | 0.0 | 0.0 |
| DEX0488_033.nt.1 | 79019.1 | 5.0 | 5.0 | 11.1 | 11.1 | 0.0 | 0.0 |
| DEX0488_033.nt.1 | 79020 | 0.0 | 0.0 | 0.0 | 0.0 | 0.0 | 0.0 |
| DEX0488_033.nt.1 | 79020.1 | 0.0 | 0.0 | 0.0 | 0.0 | 0.0 | 0.0 |
| DEX0488_033.nt.2 | 79019 | 5.0 | 5.0 | 11.1 | 11.1 | 0.0 | 0.0 |
| DEX0488_033.nt.2 | 79019.1 | 5.0 | 5.0 | 11.1 | 11.1 | 0.0 | 0.0 |
| DEX0488_033.nt.2 | 79020 | 0.0 | 0.0 | 0.0 | 0.0 | 0.0 | 0.0 |
| DEX0488_033.nt.2 | 79020.1 | 0.0 | 0.0 | 0.0 | 0.0 | 0.0 | 0.0 |
| DEX0488_034.nt.1 | 90123 | 0.0 | 0.0 | 0.0 | 0.0 | 0.0 | 0.0 |
| DEX0488_034.nt.1 | 90123.1 | 0.0 | 0.0 | 0.0 | 0.0 | 0.0 | 0.0 |
| DEX0488_034.nt.1 | 90124 | 0.0 | 0.0 | 0.0 | 0.0 | 0.0 | 0.0 |
| DEX0488_034.nt.1 | 90124.1 | 0.0 | 0.0 | 0.0 | 0.0 | 0.0 | 0.0 |
| DEX0488_035.nt.1 | 79903 | 10.0 | 10.0 | 0.0 | 0.0 | 18.2 | 18.2 |
| DEX0488_035.nt.1 | 79903.1 | 5.0 | 5.0 | 0.0 | 0.0 | 9.1 | 9.1 |
| DEX0488_035.nt.1 | 79904 | 10.0 | 10.5 | 0.0 | 0.0 | 18.2 | 20.0 |
| DEX0488_035.nt.1 | 79904.1 | 10.0 | 10.0 | 0.0 | 0.0 | 18.2 | 18.2 |
| DEX0488_035.nt.2 | 79903 | 10.0 | 10.0 | 0.0 | 0.0 | 18.2 | 18.2 |
| DEX0488_035.nt.2 | 79903.1 | 5.0 | 5.0 | 0.0 | 0.0 | 9.1 | 9.1 |
| DEX0488_035.nt.2 | 79904 | 10.0 | 10.5 | 0.0 | 0.0 | 18.2 | 20.0 |
| DEX0488_035.nt.2 | 79904.1 | 10.0 | 10.0 | 0.0 | 0.0 | 18.2 | 18.2 |
| DEX0488_036.nt.1 | 3976 | 0.0 | 0.0 | 0.0 | 0.0 | 0.0 | 0.0 |
| DEX0488_036.nt.1 | 3976.1 | 0.0 | 0.0 | 0.0 | 0.0 | 0.0 | 0.0 |
| DEX0488_036.nt.1 | 3977 | 0.0 | 0.0 | 0.0 | 0.0 | 0.0 | 0.0 |
| DEX0488_036.nt.1 | 3977.1 | 0.0 | 0.0 | 0.0 | 0.0 | 0.0 | 0.0 |
| DEX0488_036.nt.2 | 3976 | 0.0 | 0.0 | 0.0 | 0.0 | 0.0 | 0.0 |
| DEX0488_036.nt.2 | 3976.1 | 0.0 | 0.0 | 0.0 | 0.0 | 0.0 | 0.0 |
| DEX0488_036.nt.2 | 3977 | 0.0 | 0.0 | 0.0 | 0.0 | 0.0 | 0.0 |
| DEX0488_036.nt.2 | 3977.1 | 0.0 | 0.0 | 0.0 | 0.0 | 0.0 | 0.0 |

[0511] TABLE 18

| | | | | | | Mam | Mam |
|---|---|---|---|---|---|---|---|
| | | Mam | Mam | | Mam | Multi- | Multi- |
| | | Multi- | Multi- | Mam | Multi- | cancer | cancer |
| | | cancer | cancer | Multi- | cancer | 550 | 550 |
| | | 550 ALL | 550 ALL | cancer | 550 ST1 | ST2, 3 | ST2, 3 |
| | Oligo | % up | % valid | 550 ST1 | % valid | % up | % valid |
| DEX ID | Name | n = 20 | up n = 20 | % up n = 9 | up n = 9 | n = 11 | up n = 11 |
| DEX0488_001.nt.1 | 79931 | 55.0 | 55.0 | 55.6 | 55.6 | 54.5 | 54.5 |
| DEX0488_001.nt.1 | 79931.1 | 70.0 | 70.0 | 77.8 | 77.8 | 63.6 | 63.6 |
| DEX0488_001.nt.1 | 79932 | 75.0 | 75.0 | 88.9 | 88.9 | 63.6 | 63.6 |
| DEX0488_001.nt.1 | 79932.1 | 85.0 | 85.0 | 88.9 | 88.9 | 81.8 | 81.8 |
| DEX0488_001.nt.10 | 79931 | 55.0 | 55.0 | 55.6 | 55.6 | 54.5 | 54.5 |
| DEX0488_001.nt.10 | 79931.1 | 70.0 | 70.0 | 77.8 | 77.8 | 63.6 | 63.6 |
| DEX0488_001.nt.10 | 79932 | 75.0 | 75.0 | 88.9 | 88.9 | 63.6 | 63.6 |
| DEX0488_001.nt.10 | 79932.1 | 85.0 | 85.0 | 88.9 | 88.9 | 81.8 | 81.8 |
| DEX0488_001.nt.11 | 79931 | 55.0 | 55.0 | 55.6 | 55.6 | 54.5 | 54.5 |
| DEX0488_001.nt.11 | 79931.1 | 70.0 | 70.0 | 77.8 | 77.8 | 63.6 | 63.6 |
| DEX0488_001.nt.11 | 79932 | 75.0 | 75.0 | 88.9 | 88.9 | 63.6 | 63.6 |
| DEX0488_001.nt.11 | 79932.1 | 85.0 | 85.0 | 88.9 | 88.9 | 81.8 | 81.8 |
| DEX0488_001.nt.2 | 79931 | 55.0 | 55.0 | 55.6 | 55.6 | 54.5 | 54.5 |
| DEX0488_001.nt.2 | 79931.1 | 70.0 | 70.0 | 77.8 | 77.8 | 63.6 | 63.6 |
| DEX0488_001.nt.2 | 79932 | 75.0 | 75.0 | 88.9 | 88.9 | 63.6 | 63.6 |
| DEX0488_001.nt.2 | 79932.1 | 85.0 | 85.0 | 88.9 | 88.9 | 81.8 | 81.8 |
| DEX0488_001.nt.3 | 79931 | 55.0 | 55.0 | 55.6 | 55.6 | 54.5 | 54.5 |
| DEX0488_001.nt.3 | 79931.1 | 70.0 | 70.0 | 77.8 | 77.8 | 63.6 | 63.6 |
| DEX0488_001.nt.3 | 79932 | 75.0 | 75.0 | 88.9 | 88.9 | 63.6 | 63.6 |
| DEX0488_001.nt.3 | 79932.1 | 85.0 | 85.0 | 88.9 | 88.9 | 81.8 | 81.8 |
| DEX0488_001.nt.4 | 79931 | 55.0 | 55.0 | 55.6 | 55.6 | 54.5 | 54.5 |
| DEX0488_001.nt.4 | 79931.1 | 70.0 | 70.0 | 77.8 | 77.8 | 63.6 | 63.6 |
| DEX0488_001.nt.4 | 79932 | 75.0 | 75.0 | 88.9 | 88.9 | 63.6 | 63.6 |
| DEX0488_001.nt.4 | 79932.1 | 85.0 | 85.0 | 88.9 | 88.9 | 81.8 | 81.8 |
| DEX0488_001.nt.5 | 79931 | 55.0 | 55.0 | 55.6 | 55.6 | 54.5 | 54.5 |
| DEX0488_001.nt.5 | 79931.1 | 70.0 | 70.0 | 77.8 | 77.8 | 63.6 | 63.6 |
| DEX0488_001.nt.5 | 79932 | 75.0 | 75.0 | 88.9 | 88.9 | 63.6 | 63.6 |
| DEX0488_001.nt.5 | 79932.1 | 85.0 | 85.0 | 88.9 | 88.9 | 81.8 | 81.8 |
| DEX0488_001.nt.6 | 79931 | 55.0 | 55.0 | 55.6 | 55.6 | 54.5 | 54.5 |
| DEX0488_001.nt.6 | 79931.1 | 70.0 | 70.0 | 77.8 | 77.8 | 63.6 | 63.6 |
| DEX0488_001.nt.6 | 79932 | 75.0 | 75.0 | 88.9 | 88.9 | 63.6 | 63.6 |
| DEX0488_001.nt.6 | 79932.1 | 85.0 | 85.0 | 88.9 | 88.9 | 81.8 | 81.8 |
| DEX0488_001.nt.7 | 79931 | 55.0 | 55.0 | 55.6 | 55.6 | 54.5 | 54.5 |
| DEX0488_001.nt.7 | 79931.1 | 70.0 | 70.0 | 77.8 | 77.8 | 63.6 | 63.6 |
| DEX0488_001.nt.7 | 79932 | 75.0 | 75.0 | 88.9 | 88.9 | 63.6 | 63.6 |
| DEX0488_001.nt.7 | 79932.1 | 85.0 | 85.0 | 88.9 | 88.9 | 81.8 | 81.8 |
| DEX0488_001.nt.8 | 79931 | 55.0 | 55.0 | 55.6 | 55.6 | 54.5 | 54.5 |
| DEX0488_001.nt.8 | 79931.1 | 70.0 | 70.0 | 77.8 | 77.8 | 63.6 | 63.6 |
| DEX0488_001.nt.8 | 79932 | 75.0 | 75.0 | 88.9 | 88.9 | 63.6 | 63.6 |
| DEX0488_001.nt.8 | 79932.1 | 85.0 | 85.0 | 88.9 | 88.9 | 81.8 | 81.8 |
| DEX0488_001.nt.9 | 79931 | 55.0 | 55.0 | 55.6 | 55.6 | 54.5 | 54.5 |
| DEX0488_001.nt.9 | 79931.1 | 70.0 | 70.0 | 77.8 | 77.8 | 63.6 | 63.6 |
| DEX0488_001.nt.9 | 79932 | 75.0 | 75.0 | 88.9 | 88.9 | 63.6 | 63.6 |
| DEX0488_001.nt.9 | 79932.1 | 85.0 | 85.0 | 88.9 | 88.9 | 81.8 | 81.8 |
| DEX0488_002.nt.1 | 91111 | 5.0 | 6.7 | 11.1 | 16.7 | 0.0 | 0.0 |
| DEX0488_002.nt.1 | 91111.1 | 5.0 | 10.0 | 11.1 | 16.7 | 0.0 | 0.0 |
| DEX0488_002.nt.1 | 91112 | 5.0 | 12.5 | 11.1 | 25.0 | 0.0 | 0.0 |
| DEX0488_002.nt.1 | 91112.1 | 5.0 | 11.1 | 0.0 | 0.0 | 9.1 | 25.0 |
| DEX0488_003.nt.1 | 27921 | 0.0 | 0.0 | 0.0 | 0.0 | 0.0 | 0.0 |
| DEX0488_003.nt.1 | 27921.1 | 0.0 | 0.0 | 0.0 | 0.0 | 0.0 | 0.0 |
| DEX0488_003.nt.1 | 27922 | 0.0 | 0.0 | 0.0 | 0.0 | 0.0 | 0.0 |
| DEX0488_003.nt.1 | 27922.1 | 0.0 | 0.0 | 0.0 | 0.0 | 0.0 | 0.0 |
| DEX0488_003.nt.1 | 78855 | 5.0 | 5.0 | 11.1 | 11.1 | 0.0 | 0.0 |
| DEX0488_003.nt.1 | 78855.1 | 5.0 | 5.0 | 11.1 | 11.1 | 0.0 | 0.0 |
| DEX0488_003.nt.1 | 78856 | 5.0 | 5.0 | 11.1 | 11.1 | 0.0 | 0.0 |
| DEX0488_003.nt.1 | 78856.1 | 5.0 | 5.0 | 11.1 | 11.1 | 0.0 | 0.0 |
| DEX0488_003.nt.2 | 27921 | 0.0 | 0.0 | 0.0 | 0.0 | 0.0 | 0.0 |
| DEX0488_003.nt.2 | 27921.1 | 0.0 | 0.0 | 0.0 | 0.0 | 0.0 | 0.0 |
| DEX0488_003.nt.2 | 27922 | 0.0 | 0.0 | 0.0 | 0.0 | 0.0 | 0.0 |
| DEX0488_003.nt.2 | 27922.1 | 0.0 | 0.0 | 0.0 | 0.0 | 0.0 | 0.0 |
| DEX0488_003.nt.2 | 78855 | 5.0 | 5.0 | 11.1 | 11.1 | 0.0 | 0.0 |
| DEX0488_003.nt.2 | 78855.1 | 5.0 | 5.0 | 11.1 | 11.1 | 0.0 | 0.0 |
| DEX0488_003.nt.2 | 78856 | 5.0 | 5.0 | 11.1 | 11.1 | 0.0 | 0.0 |
| DEX0488_003.nt.2 | 78856.1 | 5.0 | 5.0 | 11.1 | 11.1 | 0.0 | 0.0 |
| DEX0488_003.nt.3 | 27921 | 0.0 | 0.0 | 0.0 | 0.0 | 0.0 | 0.0 |
| DEX0488_003.nt.3 | 27921.1 | 0.0 | 0.0 | 0.0 | 0.0 | 0.0 | 0.0 |
| DEX0488_003.nt.3 | 27922 | 0.0 | 0.0 | 0.0 | 0.0 | 0.0 | 0.0 |
| DEX0488_003.nt.3 | 27922.1 | 0.0 | 0.0 | 0.0 | 0.0 | 0.0 | 0.0 |
| DEX0488_003.nt.3 | 78855 | 5.0 | 5.0 | 11.1 | 11.1 | 0.0 | 0.0 |
| DEX0488_003.nt.3 | 78855.1 | 5.0 | 5.0 | 11.1 | 11.1 | 0.0 | 0.0 |
| DEX0488_003.nt.3 | 78856 | 5.0 | 5.0 | 11.1 | 11.1 | 0.0 | 0.0 |
| DEX0488_003.nt.3 | 78856.1 | 5.0 | 5.0 | 11.1 | 11.1 | 0.0 | 0.0 |
| DEX0488_003.nt.4 | 27921 | 0.0 | 0.0 | 0.0 | 0.0 | 0.0 | 0.0 |
| DEX0488_003.nt.4 | 27921.1 | 0.0 | 0.0 | 0.0 | 0.0 | 0.0 | 0.0 |
| DEX0488_003.nt.4 | 27922 | 0.0 | 0.0 | 0.0 | 0.0 | 0.0 | 0.0 |
| DEX0488_003.nt.4 | 27922.1 | 0.0 | 0.0 | 0.0 | 0.0 | 0.0 | 0.0 |
| DEX0488_003.nt.4 | 78855 | 5.0 | 5.0 | 11.1 | 11.1 | 0.0 | 0.0 |
| DEX0488_003.nt.4 | 78855.1 | 5.0 | 5.0 | 11.1 | 11.1 | 0.0 | 0.0 |
| DEX0488_003.nt.4 | 78856 | 5.0 | 5.0 | 11.1 | 11.1 | 0.0 | 0.0 |
| DEX0488_003.nt.4 | 78856.1 | 5.0 | 5.0 | 11.1 | 11.1 | 0.0 | 0.0 |
| DEX0488_003.nt.5 | 27921 | 0.0 | 0.0 | 0.0 | 0.0 | 0.0 | 0.0 |
| DEX0488_003.nt.5 | 27921.1 | 0.0 | 0.0 | 0.0 | 0.0 | 0.0 | 0.0 |
| DEX0488_003.nt.5 | 27922 | 0.0 | 0.0 | 0.0 | 0.0 | 0.0 | 0.0 |
| DEX0488_003.nt.5 | 27922.1 | 0.0 | 0.0 | 0.0 | 0.0 | 0.0 | 0.0 |
| DEX0488_003.nt.5 | 78855 | 5.0 | 5.0 | 11.1 | 11.1 | 0.0 | 0.0 |
| DEX0488_003.nt.5 | 78855.1 | 5.0 | 5.0 | 11.1 | 11.1 | 0.0 | 0.0 |
| DEX0488_003.nt.5 | 78856 | 5.0 | 5.0 | 11.1 | 11.1 | 0.0 | 0.0 |
| DEX0488_003.nt.5 | 78856.1 | 5.0 | 5.0 | 11.1 | 11.1 | 0.0 | 0.0 |
| DEX0488_003.nt.6 | 27921 | 0.0 | 0.0 | 0.0 | 0.0 | 0.0 | 0.0 |
| DEX0488_003.nt.6 | 27921.1 | 0.0 | 0.0 | 0.0 | 0.0 | 0.0 | 0.0 |
| DEX0488_003.nt.6 | 27922 | 0.0 | 0.0 | 0.0 | 0.0 | 0.0 | 0.0 |
| DEX0488_003.nt.6 | 27922.1 | 0.0 | 0.0 | 0.0 | 0.0 | 0.0 | 0.0 |
| DEX0488_003.nt.6 | 78855 | 5.0 | 5.0 | 11.1 | 11.1 | 0.0 | 0.0 |
| DEX0488_003.nt.6 | 78855.1 | 5.0 | 5.0 | 11.1 | 11.1 | 0.0 | 0.0 |
| DEX0488_003.nt.6 | 78856 | 5.0 | 5.0 | 11.1 | 11.1 | 0.0 | 0.0 |
| DEX0488_003.nt.6 | 78856.1 | 5.0 | 5.0 | 11.1 | 11.1 | 0.0 | 0.0 |
| DEX0488_003.nt.7 | 78855 | 5.0 | 5.0 | 11.1 | 11.1 | 0.0 | 0.0 |
| DEX0488_003.nt.7 | 78855.1 | 5.0 | 5.0 | 11.1 | 11.1 | 0.0 | 0.0 |
| DEX0488_003.nt.7 | 78856 | 5.0 | 5.0 | 11.1 | 11.1 | 0.0 | 0.0 |
| DEX0488_003.nt.7 | 78856.1 | 5.0 | 5.0 | 11.1 | 11.1 | 0.0 | 0.0 |
| DEX0488_004.nt.1 | 10666 | 0.0 | 0.0 | 0.0 | 0.0 | 0.0 | 0.0 |
| DEX0488_004.nt.1 | 10666.1 | 0.0 | 0.0 | 0.0 | 0.0 | 0.0 | 0.0 |
| DEX0488_004.nt.1 | 10667 | 0.0 | 0.0 | 0.0 | 0.0 | 0.0 | 0.0 |
| DEX0488_004.nt.1 | 10667.1 | 0.0 | 0.0 | 0.0 | 0.0 | 0.0 | 0.0 |
| DEX0488_005.nt.1 | 9744 | 20.0 | 20.0 | 33.3 | 33.3 | 9.1 | 9.1 |
| DEX0488_005.nt.1 | 9744.1 | 15.0 | 15.0 | 33.3 | 33.3 | 0.0 | 0.0 |
| DEX0488_005.nt.1 | 9745 | 25.0 | 25.0 | 33.3 | 33.3 | 18.2 | 18.2 |
| DEX0488_005.nt.1 | 9745.1 | 25.0 | 25.0 | 33.3 | 33.3 | 18.2 | 18.2 |
| DEX0488_006.nt.1 | 4353 | 30.0 | 31.6 | 33.3 | 37.5 | 27.3 | 27.3 |
| DEX0488_006.nt.1 | 4353.1 | 30.0 | 31.6 | 33.3 | 37.5 | 27.3 | 27.3 |
| DEX0488_006.nt.1 | 5804 | 30.0 | 31.6 | 33.3 | 37.5 | 27.3 | 27.3 |
| DEX0488_006.nt.1 | 5804.1 | 30.0 | 31.6 | 33.3 | 37.5 | 27.3 | 27.3 |
| DEX0488_006.nt.1 | 5804.2 | 30.0 | 31.6 | 33.3 | 37.5 | 27.3 | 27.3 |
| DEX0488_006.nt.1 | 92287 | 30.0 | 30.0 | 44.4 | 44.4 | 18.2 | 18.2 |
| DEX0488_006.nt.1 | 92287.1 | 25.0 | 26.3 | 22.2 | 25.0 | 27.3 | 27.3 |
| DEX0488_007.nt.1 | 41955 | 5.0 | 25.0 | 11.1 | 33.3 | 0.0 | 0.0 |
| DEX0488_007.nt.1 | 41955.1 | 5.0 | 25.0 | 11.1 | 33.3 | 0.0 | 0.0 |
| DEX0488_007.nt.1 | 41955.2 | 5.0 | 33.3 | 11.1 | 33.3 | 0.0 | 0.0 |
| DEX0488_007.nt.1 | 41955.3 | 5.0 | 25.0 | 11.1 | 33.3 | 0.0 | 0.0 |
| DEX0488_007.nt.1 | 41955.4 | 5.0 | 25.0 | 11.1 | 33.3 | 0.0 | 0.0 |
| DEX0488_007.nt.1 | 41956 | 5.0 | 33.3 | 11.1 | 33.3 | 0.0 | 0.0 |
| DEX0488_007.nt.1 | 41956.1 | 5.0 | 33.3 | 11.1 | 50.0 | 0.0 | 0.0 |
| DEX0488_007.nt.1 | 41956.2 | 5.0 | 33.3 | 11.1 | 33.3 | 0.0 | 0.0 |
| DEX0488_007.nt.1 | 41956.3 | 5.0 | 33.3 | 11.1 | 33.3 | 0.0 | 0.0 |
| DEX0488_007.nt.1 | 41956.4 | 5.0 | 20.0 | 11.1 | 33.3 | 0.0 | 0.0 |
| DEX0488_008.nt.1 | 17292 | 30.0 | 30.0 | 22.2 | 22.2 | 36.4 | 36.4 |
| DEX0488_008.nt.1 | 17292.1 | 30.0 | 30.0 | 22.2 | 22.2 | 36.4 | 36.4 |
| DEX0488_008.nt.1 | 17293 | 30.0 | 30.0 | 22.2 | 22.2 | 36.4 | 36.4 |
| DEX0488_008.nt.1 | 17293.1 | 30.0 | 30.0 | 22.2 | 22.2 | 36.4 | 36.4 |
| DEX0488_008.nt.1 | 2085 | 30.0 | 30.0 | 22.2 | 22.2 | 36.4 | 36.4 |
| DEX0488_008.nt.1 | 24404 | 30.0 | 30.0 | 22.2 | 22.2 | 36.4 | 36.4 |
| DEX0488_008.nt.1 | 24404.1 | 30.0 | 30.0 | 22.2 | 22.2 | 36.4 | 36.4 |
| DEX0488_008.nt.1 | 24405 | 30.0 | 30.0 | 22.2 | 22.2 | 36.4 | 36.4 |
| DEX0488_008.nt.1 | 24405.1 | 30.0 | 30.0 | 22.2 | 22.2 | 36.4 | 36.4 |
| DEX0488_008.nt.1 | 4909 | 30.0 | 30.0 | 22.2 | 22.2 | 36.4 | 36.4 |
| DEX0488_008.nt.1 | 4909.1 | 30.0 | 30.0 | 22.2 | 22.2 | 36.4 | 36.4 |
| DEX0488_008.nt.1 | 4910 | 30.0 | 30.0 | 22.2 | 22.2 | 36.4 | 36.4 |
| DEX0488_008.nt.1 | 4910.1 | 30.0 | 30.0 | 22.2 | 22.2 | 36.4 | 36.4 |
| DEX0488_008.nt.2 | 17292 | 30.0 | 30.0 | 22.2 | 22.2 | 36.4 | 36.4 |
| DEX0488_008.nt.2 | 17292.1 | 30.0 | 30.0 | 22.2 | 22.2 | 36.4 | 36.4 |
| DEX0488_008.nt.2 | 17293 | 30.0 | 30.0 | 22.2 | 22.2 | 36.4 | 36.4 |
| DEX0488_008.nt.2 | 17293.1 | 30.0 | 30.0 | 22.2 | 22.2 | 36.4 | 36.4 |
| DEX0488_008.nt.2 | 2085 | 30.0 | 30.0 | 22.2 | 22.2 | 36.4 | 36.4 |
| DEX0488_008.nt.2 | 24404 | 30.0 | 30.0 | 22.2 | 22.2 | 36.4 | 36.4 |
| DEX0488_008.nt.2 | 24404.1 | 30.0 | 30.0 | 22.2 | 22.2 | 36.4 | 36.4 |
| DEX0488_008.nt.2 | 24405 | 30.0 | 30.0 | 22.2 | 22.2 | 36.4 | 36.4 |
| DEX0488_008.nt.2 | 24405.1 | 30.0 | 30.0 | 22.2 | 22.2 | 36.4 | 36.4 |
| DEX0488_008.nt.2 | 4909 | 30.0 | 30.0 | 22.2 | 22.2 | 36.4 | 36.4 |
| DEX0488_008.nt.2 | 4909.1 | 30.0 | 30.0 | 22.2 | 22.2 | 36.4 | 36.4 |
| DEX0488_008.nt.2 | 4910 | 30.0 | 30.0 | 22.2 | 22.2 | 36.4 | 36.4 |
| DEX0488_008.nt.2 | 4910.1 | 30.0 | 30.0 | 22.2 | 22.2 | 36.4 | 36.4 |
| DEX0488_009.nt.1 | 79339 | 15.0 | 15.8 | 22.2 | 25.0 | 9.1 | 9.1 |
| DEX0488_009.nt.1 | 79339.1 | 15.0 | 20.0 | 22.2 | 33.3 | 9.1 | 11.1 |
| DEX0488_010.nt.1 | 26770 | 70.0 | 73.7 | 55.6 | 62.5 | 81.8 | 81.8 |
| DEX0488_010.nt.1 | 26770.1 | 70.0 | 77.8 | 55.6 | 71.4 | 81.8 | 81.8 |
| DEX0488_011.nt.1 | 33840 | 85.0 | 89.5 | 77.8 | 77.8 | 90.9 | 100.0 |
| DEX0488_011.nt.1 | 33840.1 | 85.0 | 85.0 | 77.8 | 77.8 | 90.9 | 90.9 |
| DEX0488_011.nt.1 | 33841 | 75.0 | 78.9 | 66.7 | 75.0 | 81.8 | 81.8 |
| DEX0488_011.nt.1 | 33841.1 | 80.0 | 80.0 | 66.7 | 66.7 | 90.9 | 90.9 |
| DEX0488_011.nt.1 | 39927 | 80.0 | 84.2 | 77.8 | 77.8 | 81.8 | 90.0 |
| DEX0488_011.nt.1 | 39927.1 | 90.0 | 90.0 | 77.8 | 77.8 | 100.0 | 100.0 |
| DEX0488_011.nt.1 | 39927.2 | 85.0 | 89.5 | 77.8 | 77.8 | 90.9 | 100.0 |
| DEX0488_011.nt.1 | 39927.3 | 90.0 | 90.0 | 77.8 | 77.8 | 100.0 | 100.0 |
| DEX0488_011.nt.1 | 39927.4 | 75.0 | 75.0 | 66.7 | 66.7 | 81.8 | 81.8 |
| DEX0488_011.nt.1 | 39928 | 75.0 | 78.9 | 66.7 | 66.7 | 81.8 | 90.0 |
| DEX0488_011.nt.1 | 39928.1 | 80.0 | 80.0 | 77.8 | 77.8 | 81.8 | 81.8 |
| DEX0488_011.nt.1 | 39928.2 | 75.0 | 75.0 | 66.7 | 66.7 | 81.8 | 81.8 |
| DEX0488_011.nt.1 | 39928.3 | 80.0 | 80.0 | 77.8 | 77.8 | 81.8 | 81.8 |
| DEX0488_011.nt.1 | 39928.4 | 75.0 | 75.0 | 66.7 | 66.7 | 81.8 | 81.8 |
| DEX0488_012.nt.1 | 21187 | 50.0 | 52.6 | 88.9 | 88.9 | 18.2 | 20.0 |
| DEX0488_012.nt.1 | 21187.1 | 50.0 | 52.6 | 88.9 | 88.9 | 18.2 | 20.0 |
| DEX0488_012.nt.1 | 21188 | 10.0 | 10.0 | 22.2 | 22.2 | 0.0 | 0.0 |
| DEX0488_012.nt.1 | 21188.1 | 10.0 | 10.0 | 22.2 | 22.2 | 0.0 | 0.0 |
| DEX0488_012.nt.1 | 78927 | 55.0 | 57.9 | 88.9 | 88.9 | 27.3 | 30.0 |
| DEX0488_012.nt.1 | 78927.1 | 65.0 | 68.4 | 88.9 | 88.9 | 45.5 | 50.0 |
| DEX0488_013.nt.1 | 79955 | 5.0 | 5.0 | 0.0 | 0.0 | 9.1 | 9.1 |
| DEX0488_013.nt.1 | 79955.1 | 5.0 | 5.0 | 0.0 | 0.0 | 9.1 | 9.1 |
| DEX0488_013.nt.1 | 79956 | 25.0 | 25.0 | 44.4 | 44.4 | 9.1 | 9.1 |
| DEX0488_013.nt.1 | 79956.1 | 15.0 | 15.0 | 22.2 | 22.2 | 9.1 | 9.1 |
| DEX0488_013.nt.1 | 79959 | 10.0 | 10.0 | 0.0 | 0.0 | 18.2 | 18.2 |
| DEX0488_013.nt.1 | 79959.1 | 10.0 | 10.0 | 11.1 | 11.1 | 9.1 | 9.1 |
| DEX0488_013.nt.1 | 79960 | 25.0 | 25.0 | 22.2 | 22.2 | 27.3 | 27.3 |
| DEX0488_013.nt.1 | 79960.1 | 15.0 | 17.6 | 11.1 | 11.1 | 18.2 | 25.0 |
| DEX0488_013.nt.1 | 79963 | 5.0 | 5.3 | 0.0 | 0.0 | 9.1 | 10.0 |
| DEX0488_013.nt.1 | 79963.1 | 10.0 | 11.1 | 11.1 | 14.3 | 9.1 | 9.1 |
| DEX0488_013.nt.1 | 79964 | 0.0 | 0.0 | 0.0 | 0.0 | 0.0 | 0.0 |
| DEX0488_013.nt.1 | 79964.1 | 5.0 | 5.0 | 0.0 | 0.0 | 9.1 | 9.1 |
| DEX0488_013.nt.2 | 79959 | 10.0 | 10.0 | 0.0 | 0.0 | 18.2 | 18.2 |
| DEX0488_013.nt.2 | 79959.1 | 10.0 | 10.0 | 11.1 | 11.1 | 9.1 | 9.1 |
| DEX0488_013.nt.2 | 79960 | 25.0 | 25.0 | 22.2 | 22.2 | 27.3 | 27.3 |
| DEX0488_013.nt.2 | 79960.1 | 15.0 | 17.6 | 11.1 | 11.1 | 18.2 | 25.0 |
| DEX0488_014.nt.1 | 90171 | 25.0 | 25.0 | 11.1 | 11.1 | 36.4 | 36.4 |
| DEX0488_014.nt.1 | 90171.1 | 30.0 | 30.0 | 11.1 | 11.1 | 45.5 | 45.5 |
| DEX0488_014.nt.1 | 90172 | 10.0 | 16.7 | 11.1 | 14.3 | 9.1 | 20.0 |
| DEX0488_014.nt.1 | 90172.1 | 25.0 | 26.3 | 11.1 | 11.1 | 36.4 | 40.0 |
| DEX0488_014.nt.2 | 90171 | 25.0 | 25.0 | 11.1 | 11.1 | 36.4 | 36.4 |
| DEX0488_014.nt.2 | 90171.1 | 30.0 | 30.0 | 11.1 | 11.1 | 45.5 | 45.5 |
| DEX0488_014.nt.2 | 90172 | 10.0 | 16.7 | 11.1 | 14.3 | 9.1 | 20.0 |
| DEX0488_014.nt.2 | 90172.1 | 25.0 | 26.3 | 11.1 | 11.1 | 36.4 | 40.0 |
| DEX0488_014.nt.3 | 90171 | 25.0 | 25.0 | 11.1 | 11.1 | 36.4 | 36.4 |
| DEX0488_014.nt.3 | 90171.1 | 30.0 | 30.0 | 11.1 | 11.1 | 45.5 | 45.5 |
| DEX0488_014.nt.3 | 90172 | 10.0 | 16.7 | 11.1 | 14.3 | 9.1 | 20.0 |
| DEX0488_014.nt.3 | 90172.1 | 25.0 | 26.3 | 11.1 | 11.1 | 36.4 | 40.0 |
| DEX0488_014.nt.4 | 90171 | 25.0 | 25.0 | 11.1 | 11.1 | 36.4 | 36.4 |
| DEX0488_014.nt.4 | 90171.1 | 30.0 | 30.0 | 11.1 | 11.1 | 45.5 | 45.5 |
| DEX0488_014.nt.4 | 90172 | 10.0 | 16.7 | 11.1 | 14.3 | 9.1 | 20.0 |
| DEX0488_014.nt.4 | 90172.1 | 25.0 | 26.3 | 11.1 | 11.1 | 36.4 | 40.0 |
| DEX0488_015.nt.1 | 78631 | 55.0 | 78.6 | 55.6 | 71.4 | 54.5 | 85.7 |
| DEX0488_015.nt.1 | 78631.1 | 45.0 | 69.2 | 55.6 | 83.3 | 36.4 | 57.1 |
| DEX0488_015.nt.1 | 78632 | 25.0 | 25.0 | 33.3 | 33.3 | 18.2 | 18.2 |
| DEX0488_015.nt.1 | 78632.1 | 25.0 | 25.0 | 22.2 | 22.2 | 27.3 | 27.3 |
| DEX0488_015.nt.2 | 78631 | 55.0 | 78.6 | 55.6 | 71.4 | 54.5 | 85.7 |
| DEX0488_015.nt.2 | 78631.1 | 45.0 | 69.2 | 55.6 | 83.3 | 36.4 | 57.1 |
| DEX0488_015.nt.2 | 78632 | 25.0 | 25.0 | 33.3 | 33.3 | 18.2 | 18.2 |
| DEX0488_015.nt.2 | 78632.1 | 25.0 | 25.0 | 22.2 | 22.2 | 27.3 | 27.3 |
| DEX0488_016.nt.1 | 79660 | 30.0 | 46.2 | 33.3 | 60.0 | 27.3 | 37.5 |
| DEX0488_016.nt.1 | 79660.1 | 25.0 | 38.5 | 33.3 | 60.0 | 18.2 | 25.0 |
| DEX0488_016.nt.10 | 79659 | 0.0 | 0.0 | 0.0 | 0.0 | 0.0 | 0.0 |
| DEX0488_016.nt.10 | 79659.1 | 0.0 | 0.0 | 0.0 | 0.0 | 0.0 | 0.0 |
| DEX0488_016.nt.10 | 79660 | 30.0 | 46.2 | 33.3 | 60.0 | 27.3 | 37.5 |
| DEX0488_016.nt.10 | 79660.1 | 25.0 | 38.5 | 33.3 | 60.0 | 18.2 | 25.0 |
| DEX0488_016.nt.11 | 79659 | 0.0 | 0.0 | 0.0 | 0.0 | 0.0 | 0.0 |
| DEX0488_016.nt.11 | 79659.1 | 0.0 | 0.0 | 0.0 | 0.0 | 0.0 | 0.0 |
| DEX0488_016.nt.11 | 79660 | 30.0 | 46.2 | 33.3 | 60.0 | 27.3 | 37.5 |
| DEX0488_016.nt.11 | 79660.1 | 25.0 | 38.5 | 33.3 | 60.0 | 18.2 | 25.0 |
| DEX0488_016.nt.2 | 79660 | 30.0 | 46.2 | 33.3 | 60.0 | 27.3 | 37.5 |
| DEX0488_016.nt.2 | 79660.1 | 25.0 | 38.5 | 33.3 | 60.0 | 18.2 | 25.0 |
| DEX0488_016.nt.3 | 79660 | 30.0 | 46.2 | 33.3 | 60.0 | 27.3 | 37.5 |
| DEX0488_016.nt.3 | 79660.1 | 25.0 | 38.5 | 33.3 | 60.0 | 18.2 | 25.0 |
| DEX0488_016.nt.4 | 79660 | 30.0 | 46.2 | 33.3 | 60.0 | 27.3 | 37.5 |
| DEX0488_016.nt.4 | 79660.1 | 25.0 | 38.5 | 33.3 | 60.0 | 18.2 | 25.0 |
| DEX0488_016.nt.5 | 79660 | 30.0 | 46.2 | 33.3 | 60.0 | 27.3 | 37.5 |
| DEX0488_016.nt.5 | 79660.1 | 25.0 | 38.5 | 33.3 | 60.0 | 18.2 | 25.0 |
| DEX0488_016.nt.6 | 79660 | 30.0 | 46.2 | 33.3 | 60.0 | 27.3 | 37.5 |
| DEX0488_016.nt.6 | 79660.1 | 25.0 | 38.5 | 33.3 | 60.0 | 18.2 | 25.0 |
| DEX0488_016.nt.7 | 79660 | 30.0 | 46.2 | 33.3 | 60.0 | 27.3 | 37.5 |
| DEX0488_016.nt.7 | 79660.1 | 25.0 | 38.5 | 33.3 | 60.0 | 18.2 | 25.0 |
| DEX0488_016.nt.8 | 79660 | 30.0 | 46.2 | 33.3 | 60.0 | 27.3 | 37.5 |
| DEX0488_016.nt.8 | 79660.1 | 25.0 | 38.5 | 33.3 | 60.0 | 18.2 | 25.0 |
| DEX0488_016.nt.9 | 79660 | 30.0 | 46.2 | 33.3 | 60.0 | 27.3 | 37.5 |
| DEX0488_016.nt.9 | 79660.1 | 25.0 | 38.5 | 33.3 | 60.0 | 18.2 | 25.0 |
| DEX0488_017.nt.1 | 4353 | 30.0 | 31.6 | 33.3 | 37.5 | 27.3 | 27.3 |
| DEX0488_017.nt.1 | 4353.1 | 30.0 | 31.6 | 33.3 | 37.5 | 27.3 | 27.3 |
| DEX0488_017.nt.1 | 5804 | 30.0 | 31.6 | 33.3 | 37.5 | 27.3 | 27.3 |
| DEX0488_017.nt.1 | 5804.1 | 30.0 | 31.6 | 33.3 | 37.5 | 27.3 | 27.3 |
| DEX0488_017.nt.1 | 5804.2 | 30.0 | 31.6 | 33.3 | 37.5 | 27.3 | 27.3 |
| DEX0488_017.nt.1 | 92287 | 30.0 | 30.0 | 44.4 | 44.4 | 18.2 | 18.2 |
| DEX0488_017.nt.1 | 92287.1 | 25.0 | 26.3 | 22.2 | 25.0 | 27.3 | 27.3 |
| DEX0488_018.nt.1 | 79936 | 60.0 | 60.0 | 66.7 | 66.7 | 54.5 | 54.5 |
| DEX0488_018.nt.1 | 79936.1 | 60.0 | 63.2 | 66.7 | 66.7 | 54.5 | 60.0 |
| DEX0488_018.nt.1 | 79944 | 60.0 | 75.0 | 66.7 | 75.0 | 54.5 | 75.0 |
| DEX0488_018.nt.1 | 79944.1 | 60.0 | 63.2 | 66.7 | 66.7 | 54.5 | 60.0 |
| DEX0488_018.nt.2 | 79936 | 60.0 | 60.0 | 66.7 | 66.7 | 54.5 | 54.5 |
| DEX0488_018.nt.2 | 79936.1 | 60.0 | 63.2 | 66.7 | 66.7 | 54.5 | 60.0 |
| DEX0488_018.nt.2 | 79944 | 60.0 | 75.0 | 66.7 | 75.0 | 54.5 | 75.0 |
| DEX0488_018.nt.2 | 79944.1 | 60.0 | 63.2 | 66.7 | 66.7 | 54.5 | 60.0 |
| DEX0488_018.nt.3 | 79936 | 60.0 | 60.0 | 66.7 | 66.7 | 54.5 | 54.5 |
| DEX0488_018.nt.3 | 79936.1 | 60.0 | 63.2 | 66.7 | 66.7 | 54.5 | 60.0 |
| DEX0488_018.nt.3 | 79944 | 60.0 | 75.0 | 66.7 | 75.0 | 54.5 | 75.0 |
| DEX0488_018.nt.3 | 79944.1 | 60.0 | 63.2 | 66.7 | 66.7 | 54.5 | 60.0 |
| DEX0488_018.nt.4 | 79936 | 60.0 | 60.0 | 66.7 | 66.7 | 54.5 | 54.5 |
| DEX0488_018.nt.4 | 79936.1 | 60.0 | 63.2 | 66.7 | 66.7 | 54.5 | 60.0 |
| DEX0488_018.nt.4 | 79944 | 60.0 | 75.0 | 66.7 | 75.0 | 54.5 | 75.0 |
| DEX0488_018.nt.4 | 79944.1 | 60.0 | 63.2 | 66.7 | 66.7 | 54.5 | 60.0 |
| DEX0488_018.nt.5 | 79936 | 60.0 | 60.0 | 66.7 | 66.7 | 54.5 | 54.5 |
| DEX0488_018.nt.5 | 79936.1 | 60.0 | 63.2 | 66.7 | 66.7 | 54.5 | 60.0 |
| DEX0488_018.nt.5 | 79944 | 60.0 | 75.0 | 66.7 | 75.0 | 54.5 | 75.0 |
| DEX0488_018.nt.5 | 79944.1 | 60.0 | 63.2 | 66.7 | 66.7 | 54.5 | 60.0 |
| DEX0488_018.nt.6 | 79936 | 60.0 | 60.0 | 66.7 | 66.7 | 54.5 | 54.5 |
| DEX0488_018.nt.6 | 79936.1 | 60.0 | 63.2 | 66.7 | 66.7 | 54.5 | 60.0 |
| DEX0488_018.nt.6 | 79944 | 60.0 | 75.0 | 66.7 | 75.0 | 54.5 | 75.0 |
| DEX0488_018.nt.6 | 79944.1 | 60.0 | 63.2 | 66.7 | 66.7 | 54.5 | 60.0 |
| DEX0488_018.nt.7 | 79936 | 60.0 | 60.0 | 66.7 | 66.7 | 54.5 | 54.5 |
| DEX0488_018.nt.7 | 79936.1 | 60.0 | 63.2 | 66.7 | 66.7 | 54.5 | 60.0 |
| DEX0488_018.nt.7 | 79944 | 60.0 | 75.0 | 66.7 | 75.0 | 54.5 | 75.0 |
| DEX0488_018.nt.7 | 79944.1 | 60.0 | 63.2 | 66.7 | 66.7 | 54.5 | 60.0 |
| DEX0488_018.nt.8 | 79936 | 60.0 | 60.0 | 66.7 | 66.7 | 54.5 | 54.5 |
| DEX0488_018.nt.8 | 79936.1 | 60.0 | 63.2 | 66.7 | 66.7 | 54.5 | 60.0 |
| DEX0488_018.nt.8 | 79944 | 60.0 | 75.0 | 66.7 | 75.0 | 54.5 | 75.0 |
| DEX0488_018.nt.8 | 79944.1 | 60.0 | 63.2 | 66.7 | 66.7 | 54.5 | 60.0 |
| DEX0488_019.nt.1 | 79955 | 5.0 | 5.0 | 0.0 | 0.0 | 9.1 | 9.1 |
| DEX0488_019.nt.1 | 79955.1 | 5.0 | 5.0 | 0.0 | 0.0 | 9.1 | 9.1 |
| DEX0488_019.nt.1 | 79956 | 25.0 | 25.0 | 44.4 | 44.4 | 9.1 | 9.1 |
| DEX0488_019.nt.1 | 79956.1 | 15.0 | 15.0 | 22.2 | 22.2 | 9.1 | 9.1 |
| DEX0488_019.nt.1 | 79959 | 10.0 | 10.0 | 0.0 | 0.0 | 18.2 | 18.2 |
| DEX0488_019.nt.1 | 79959.1 | 10.0 | 10.0 | 11.1 | 11.1 | 9.1 | 9.1 |
| DEX0488_019.nt.1 | 79960 | 25.0 | 25.0 | 22.2 | 22.2 | 27.3 | 27.3 |
| DEX0488_019.nt.1 | 79960.1 | 15.0 | 17.6 | 11.1 | 11.1 | 18.2 | 25.0 |
| DEX0488_019.nt.1 | 79963 | 5.0 | 5.3 | 0.0 | 0.0 | 9.1 | 10.0 |
| DEX0488_019.nt.1 | 79963.1 | 10.0 | 11.1 | 11.1 | 14.3 | 9.1 | 9.1 |
| DEX0488_019.nt.1 | 79964 | 0.0 | 0.0 | 0.0 | 0.0 | 0.0 | 0.0 |
| DEX0488_019.nt.1 | 79964.1 | 5.0 | 5.0 | 0.0 | 0.0 | 9.1 | 9.1 |
| DEX0488_019.nt.2 | 79955 | 5.0 | 5.0 | 0.0 | 0.0 | 9.1 | 9.1 |
| DEX0488_019.nt.2 | 79955.1 | 5.0 | 5.0 | 0.0 | 0.0 | 9.1 | 9.1 |
| DEX0488_019.nt.2 | 79956 | 25.0 | 25.0 | 44.4 | 44.4 | 9.1 | 9.1 |
| DEX0488_019.nt.2 | 79956.1 | 15.0 | 15.0 | 22.2 | 22.2 | 9.1 | 9.1 |
| DEX0488_019.nt.2 | 79959 | 10.0 | 10.0 | 0.0 | 0.0 | 18.2 | 18.2 |
| DEX0488_019.nt.2 | 79959.1 | 10.0 | 10.0 | 11.1 | 11.1 | 9.1 | 9.1 |
| DEX0488_019.nt.2 | 79960 | 25.0 | 25.0 | 22.2 | 22.2 | 27.3 | 27.3 |
| DEX0488_019.nt.2 | 79960.1 | 15.0 | 17.6 | 11.1 | 11.1 | 18.2 | 25.0 |
| DEX0488_019.nt.2 | 79963 | 5.0 | 5.3 | 0.0 | 0.0 | 9.1 | 10.0 |
| DEX0488_019.nt.2 | 79963.1 | 10.0 | 11.1 | 11.1 | 14.3 | 9.1 | 9.1 |
| DEX0488_019.nt.2 | 79964 | 0.0 | 0.0 | 0.0 | 0.0 | 0.0 | 0.0 |
| DEX0488_019.nt.2 | 79964.1 | 5.0 | 5.0 | 0.0 | 0.0 | 9.1 | 9.1 |
| DEX0488_019.nt.3 | 79955 | 5.0 | 5.0 | 0.0 | 0.0 | 9.1 | 9.1 |
| DEX0488_019.nt.3 | 79955.1 | 5.0 | 5.0 | 0.0 | 0.0 | 9.1 | 9.1 |
| DEX0488_019.nt.3 | 79956 | 25.0 | 25.0 | 44.4 | 44.4 | 9.1 | 9.1 |
| DEX0488_019.nt.3 | 79956.1 | 15.0 | 15.0 | 22.2 | 22.2 | 9.1 | 9.1 |
| DEX0488_019.nt.3 | 79959 | 10.0 | 10.0 | 0.0 | 0.0 | 18.2 | 18.2 |
| DEX0488_019.nt.3 | 79959.1 | 10.0 | 10.0 | 11.1 | 11.1 | 9.1 | 9.1 |
| DEX0488_019.nt.3 | 79960 | 25.0 | 25.0 | 22.2 | 22.2 | 27.3 | 27.3 |
| DEX0488_019.nt.3 | 79960.1 | 15.0 | 17.6 | 11.1 | 11.1 | 18.2 | 25.0 |
| DEX0488_019.nt.3 | 79963 | 5.0 | 5.3 | 0.0 | 0.0 | 9.1 | 10.0 |
| DEX0488_019.nt.3 | 79963.1 | 10.0 | 11.1 | 11.1 | 14.3 | 9.1 | 9.1 |
| DEX0488_019.nt.3 | 79964 | 0.0 | 0.0 | 0.0 | 0.0 | 0.0 | 0.0 |
| DEX0488_019.nt.3 | 79964.1 | 5.0 | 5.0 | 0.0 | 0.0 | 9.1 | 9.1 |
| DEX0488_019.nt.4 | 79955 | 5.0 | 5.0 | 0.0 | 0.0 | 9.1 | 9.1 |
| DEX0488_019.nt.4 | 79955.1 | 5.0 | 5.0 | 0.0 | 0.0 | 9.1 | 9.1 |
| DEX0488_019.nt.4 | 79956 | 25.0 | 25.0 | 44.4 | 44.4 | 9.1 | 9.1 |
| DEX0488_019.nt.4 | 79956.1 | 25.0 | 15.0 | 22.2 | 22.2 | 9.1 | 9.1 |
| DEX0488_019.nt.4 | 79959 | 10.0 | 10.0 | 0.0 | 0.0 | 18.2 | 18.2 |
| DEX0488_019.nt.4 | 79959.1 | 10.0 | 10.0 | 11.1 | 11.1 | 9.1 | 9.1 |
| DEX0488_019.nt.4 | 79960 | 25.0 | 25.0 | 22.2 | 22.2 | 27.3 | 27.3 |
| DEX0488_019.nt.4 | 79960.1 | 15.0 | 17.6 | 11.1 | 11.1 | 18.2 | 25.0 |
| DEX0488_019.nt.4 | 79963 | 5.0 | 5.3 | 0.0 | 0.0 | 9.1 | 10.0 |
| DEX0488_019.nt.4 | 79963.1 | 10.0 | 11.1 | 11.1 | 14.3 | 9.1 | 9.1 |
| DEX0488_019.nt.4 | 79964 | 0.0 | 0.0 | 0.0 | 0.0 | 0.0 | 0.0 |
| DEX0488_019.nt.4 | 79964.1 | 5.0 | 5.0 | 0.0 | 0.0 | 9.1 | 9.1 |
| DEX0488_019.nt.5 | 79959 | 10.0 | 10.0 | 0.0 | 0.0 | 18.2 | 18.2 |
| DEX0488_019.nt.5 | 79959.1 | 10.0 | 10.0 | 11.1 | 11.1 | 9.1 | 9.1 |
| DEX0488_019.nt.5 | 79960 | 25.0 | 25.0 | 22.2 | 22.2 | 27.3 | 27.3 |
| DEX0488_019.nt.5 | 79960.1 | 15.0 | 17.6 | 11.1 | 11.1 | 18.2 | 25.0 |
| DEX0488_019.nt.6 | 79955 | 5.0 | 5.0 | 0.0 | 0.0 | 9.1 | 9.1 |
| DEX0488_019.nt.6 | 79955.1 | 5.0 | 5.0 | 0.0 | 0.0 | 9.1 | 9.1 |
| DEX0488_019.nt.6 | 79956 | 25.0 | 25.0 | 44.4 | 44.4 | 9.1 | 9.1 |
| DEX0488_019.nt.6 | 79956.1 | 15.0 | 15.0 | 22.2 | 22.2 | 9.1 | 9.1 |
| DEX0488_019.nt.6 | 79959 | 10.0 | 10.0 | 0.0 | 0.0 | 18.2 | 18.2 |
| DEX0488_019.nt.6 | 79959.1 | 10.0 | 10.0 | 11.1 | 11.1 | 9.1 | 9.1 |
| DEX0488_019.nt.6 | 79960 | 25.0 | 25.0 | 22.2 | 22.2 | 27.3 | 27.3 |
| DEX0488_019.nt.6 | 79960.1 | 15.0 | 17.6 | 11.1 | 11.1 | 18.2 | 25.0 |
| DEX0488_019.nt.6 | 79963 | 5.0 | 5.3 | 0.0 | 0.0 | 9.1 | 10.0 |
| DEX0488_019.nt.6 | 79963.1 | 10.0 | 11.1 | 11.1 | 14.3 | 9.1 | 9.1 |
| DEX0488_019.nt.6 | 79964 | 0.0 | 0.0 | 0.0 | 0.0 | 0.0 | 0.0 |
| DEX0488_019.nt.6 | 79964.1 | 5.0 | 5.0 | 0.0 | 0.0 | 9.1 | 9.1 |
| DEX0488_019.nt.7 | 79955 | 5.0 | 5.0 | 0.0 | 0.0 | 9.1 | 9.1 |
| DEX0488_019.nt.7 | 79955.1 | 5.0 | 5.0 | 0.0 | 0.0 | 9.1 | 9.1 |
| DEX0488_019.nt.7 | 79956 | 25.0 | 25.0 | 44.4 | 44.4 | 9.1 | 9.1 |
| DEX0488_019.nt.7 | 79956.1 | 15.0 | 15.0 | 22.2 | 22.2 | 9.1 | 9.1 |
| DEX0488_019.nt.7 | 79959 | 10.0 | 10.0 | 0.0 | 0.0 | 18.2 | 18.2 |
| DEX0488_019.nt.7 | 79959.1 | 10.0 | 10.0 | 11.1 | 11.1 | 9.1 | 9.1 |
| DEX0488_019.nt.7 | 79960 | 25.0 | 25.0 | 22.2 | 22.2 | 27.3 | 27.3 |
| DEX0488_019.nt.7 | 79960.1 | 15.0 | 17.6 | 11.1 | 11.1 | 18.2 | 25.0 |
| DEX0488_019.nt.7 | 79963 | 5.0 | 5.3 | 0.0 | 0.0 | 9.1 | 10.0 |
| DEX0488_019.nt.7 | 79963.1 | 10.0 | 11.1 | 11.1 | 14.3 | 9.1 | 9.1 |
| DEX0488_019.nt.7 | 79964 | 0.0 | 0.0 | 0.0 | 0.0 | 0.0 | 0.0 |
| DEX0488_019.nt.7 | 79964.1 | 5.0 | 5.0 | 0.0 | 0.0 | 9.1 | 9.1 |
| DEX0488_019.nt.8 | 79955 | 5.0 | 5.0 | 0.0 | 0.0 | 9.1 | 9.1 |
| DEX0488_019.nt.8 | 79955.1 | 5.0 | 5.0 | 0.0 | 0.0 | 9.1 | 9.1 |
| DEX0488_019.nt.8 | 79956 | 25.0 | 25.0 | 44.4 | 44.4 | 9.1 | 9.1 |
| DEX0488_019.nt.8 | 79956.1 | 15.0 | 15.0 | 22.2 | 22.2 | 9.1 | 9.1 |
| DEX0488_019.nt.8 | 79959 | 10.0 | 10.0 | 0.0 | 0.0 | 18.2 | 18.2 |
| DEX0488_019.nt.8 | 79959.1 | 10.0 | 10.0 | 11.1 | 11.1 | 9.1 | 9.1 |
| DEX0488_019.nt.8 | 79960 | 25.0 | 25.0 | 22.2 | 22.2 | 27.3 | 27.3 |
| DEX0488_019.nt.8 | 79960.1 | 15.0 | 17.6 | 11.1 | 11.1 | 18.2 | 25.0 |
| DEX0488_019.nt.8 | 79963 | 5.0 | 5.3 | 0.0 | 0.0 | 9.1 | 10.0 |
| DEX0488_019.nt.8 | 79963.1 | 10.0 | 11.1 | 11.1 | 14.3 | 9.1 | 9.1 |
| DEX0488_019.nt.8 | 79964 | 0.0 | 0.0 | 0.0 | 0.0 | 0.0 | 0.0 |
| DEX0488_019.nt.8 | 79964.1 | 5.0 | 5.0 | 0.0 | 0.0 | 9.1 | 9.1 |
| DEX0488_020.nt.1 | 77771 | 20.0 | 26.7 | 11.1 | 16.7 | 27.3 | 33.3 |
| DEX0488_020.nt.1 | 77771.1 | 25.0 | 33.3 | 22.2 | 33.3 | 27.3 | 33.3 |
| DEX0488_020.nt.1 | 77772 | 20.0 | 30.8 | 11.1 | 20.0 | 27.3 | 37.5 |
| DEX0488_020.nt.1 | 77772.1 | 20.0 | 30.8 | 11.1 | 20.0 | 27.3 | 37.5 |
| DEX0488_021.nt.1 | 21187 | 50.0 | 52.6 | 88.9 | 88.9 | 18.2 | 20.0 |
| DEX0488_021.nt.1 | 21187.1 | 50.0 | 52.6 | 88.9 | 88.9 | 18.2 | 20.0 |
| DEX0488_021.nt.1 | 78927 | 55.0 | 57.9 | 88.9 | 88.9 | 27.3 | 30.0 |
| DEX0488_021.nt.1 | 78927.1 | 65.0 | 68.4 | 88.9 | 88.9 | 45.5 | 50.0 |
| DEX0488_021.nt.1 | 78928 | 0.0 | 0.0 | 0.0 | 0.0 | 0.0 | 0.0 |
| DEX0488_021.nt.1 | 78928.1 | 0.0 | 0.0 | 0.0 | 0.0 | 0.0 | 0.0 |
| DEX0488_021.nt.2 | 21187 | 50.0 | 52.6 | 88.9 | 88.9 | 18.2 | 20.0 |
| DEX0488_021.nt.2 | 21187.1 | 50.0 | 52.6 | 88.9 | 88.9 | 18.2 | 20.0 |
| DEX0488_021.nt.2 | 78927 | 55.0 | 57.9 | 88.9 | 88.9 | 27.3 | 30.0 |
| DEX0488_021.nt.2 | 78927.1 | 65.0 | 68.4 | 88.9 | 88.9 | 45.5 | 50.0 |
| DEX0488_021.nt.2 | 78928 | 0.0 | 0.0 | 0.0 | 0.0 | 0.0 | 0.0 |
| DEX0488_021.nt.2 | 78928.1 | 0.0 | 0.0 | 0.0 | 0.0 | 0.0 | 0.0 |
| DEX0488_022.nt.1 | 79699 | 10.0 | 10.0 | 22.2 | 22.2 | 0.0 | 0.0 |
| DEX0488_022.nt.1 | 79699.1 | 20.0 | 20.0 | 44.4 | 44.4 | 0.0 | 0.0 |
| DEX0488_022.nt.1 | 79700 | 10.0 | 10.0 | 22.2 | 22.2 | 0.0 | 0.0 |
| DEX0488_022.nt.1 | 79700.1 | 10.0 | 10.0 | 22.2 | 22.2 | 0.0 | 0.0 |
| DEX0488_022.nt.2 | 79699 | 10.0 | 10.0 | 22.2 | 22.2 | 0.0 | 0.0 |
| DEX0488_022.nt.2 | 79699.1 | 20.0 | 20.0 | 44.4 | 44.4 | 0.0 | 0.0 |
| DEX0488_022.nt.2 | 79700 | 10.0 | 10.0 | 22.2 | 22.2 | 0.0 | 0.0 |
| DEX0488_022.nt.2 | 79700.1 | 10.0 | 10.0 | 22.2 | 22.2 | 0.0 | 0.0 |
| DEX0488_022.nt.3 | 79699 | 10.0 | 10.0 | 22.2 | 22.2 | 0.0 | 0.0 |
| DEX0488_022.nt.3 | 79699.1 | 20.0 | 20.0 | 44.4 | 44.4 | 0.0 | 0.0 |
| DEX0488_022.nt.3 | 79700 | 10.0 | 10.0 | 22.2 | 22.2 | 0.0 | 0.0 |
| DEX0488_022.nt.3 | 79700.1 | 10.0 | 10.0 | 22.2 | 22.2 | 0.0 | 0.0 |
| DEX0488_022.nt.4 | 79699 | 10.0 | 10.0 | 22.2 | 22.2 | 0.0 | 0.0 |
| DEX0488_022.nt.4 | 79699.1 | 20.0 | 20.0 | 44.4 | 44.4 | 0.0 | 0.0 |
| DEX0488_022.nt.4 | 79700 | 10.0 | 10.0 | 22.2 | 22.2 | 0.0 | 0.0 |
| DEX0488_022.nt.4 | 79700.1 | 10.0 | 10.0 | 22.2 | 22.2 | 0.0 | 0.0 |
| DEX0488_022.nt.5 | 79699 | 10.0 | 10.0 | 22.2 | 22.2 | 0.0 | 0.0 |
| DEX0488_022.nt.5 | 79699.1 | 20.0 | 20.0 | 44.4 | 44.4 | 0.0 | 0.0 |
| DEX0488_022.nt.5 | 79700 | 10.0 | 10.0 | 22.2 | 22.2 | 0.0 | 0.0 |
| DEX0488_022.nt.5 | 79700.1 | 10.0 | 10.0 | 22.2 | 22.2 | 0.0 | 0.0 |
| DEX0488_022.nt.6 | 79699 | 10.0 | 10.0 | 22.2 | 22.2 | 0.0 | 0.0 |
| DEX0488_022.nt.6 | 79699.1 | 20.0 | 20.0 | 44.4 | 44.4 | 0.0 | 0.0 |
| DEX0488_022.nt.6 | 79700 | 10.0 | 10.0 | 22.2 | 22.2 | 0.0 | 0.0 |
| DEX0488_022.nt.6 | 79700.1 | 10.0 | 10.0 | 22.2 | 22.2 | 0.0 | 0.0 |
| DEX0488_022.nt.7 | 79699 | 10.0 | 10.0 | 22.2 | 22.2 | 0.0 | 0.0 |
| DEX0488_022.nt.7 | 79699.1 | 20.0 | 20.0 | 44.4 | 44.4 | 0.0 | 0.0 |
| DEX0488_022.nt.7 | 79700 | 10.0 | 10.0 | 22.2 | 22.2 | 0.0 | 0.0 |
| DEX0488_022.nt.7 | 79700.1 | 10.0 | 10.0 | 22.2 | 22.2 | 0.0 | 0.0 |
| DEX0488_022.nt.8 | 79699 | 10.0 | 10.0 | 22.2 | 22.2 | 0.0 | 0.0 |
| DEX0488_022.nt.8 | 79699.1 | 20.0 | 20.0 | 44.4 | 44.4 | 0.0 | 0.0 |
| DEX0488_022.nt.8 | 79700 | 10.0 | 10.0 | 22.2 | 22.2 | 0.0 | 0.0 |
| DEX0488_022.nt.8 | 79700.1 | 10.0 | 10.0 | 22.2 | 22.2 | 0.0 | 0.0 |
| DEX0488_023.nt.1 | 78715 | 45.0 | 45.0 | 33.3 | 33.3 | 54.5 | 54.5 |
| DEX0488_023.nt.1 | 78715.1 | 40.0 | 40.0 | 33.3 | 33.3 | 45.5 | 45.5 |
| DEX0488_023.nt.1 | 78716 | 45.0 | 45.0 | 33.3 | 33.3 | 54.5 | 54.5 |
| DEX0488_023.nt.1 | 78716.1 | 45.0 | 45.0 | 33.3 | 33.3 | 54.5 | 54.5 |
| DEX0488_023.nt.2 | 78715 | 45.0 | 45.0 | 33.3 | 33.3 | 54.5 | 54.5 |
| DEX0488_023.nt.2 | 78715.1 | 40.0 | 40.0 | 33.3 | 33.3 | 45.5 | 45.5 |
| DEX0488_023.nt.2 | 78716 | 45.0 | 45.0 | 33.3 | 33.3 | 54.5 | 54.5 |
| DEX0488_023.nt.2 | 78716.1 | 45.0 | 45.0 | 33.3 | 33.3 | 54.5 | 54.5 |
| DEX0488_024.nt.1 | 79699 | 10.0 | 10.0 | 22.2 | 22.2 | 0.0 | 0.0 |
| DEX0488_024.nt.1 | 79699.1 | 20.0 | 20.0 | 44.4 | 44.4 | 0.0 | 0.0 |
| DEX0488_024.nt.1 | 79700 | 10.0 | 10.0 | 22.2 | 22.2 | 0.0 | 0.0 |
| DEX0488_024.nt.1 | 79700.1 | 10.0 | 10.0 | 22.2 | 22.2 | 0.0 | 0.0 |
| DEX0488_024.nt.2 | 79699 | 10.0 | 10.0 | 22.2 | 22.2 | 0.0 | 0.0 |
| DEX0488_024.nt.2 | 79699.1 | 20.0 | 20.0 | 44.4 | 44.4 | 0.0 | 0.0 |
| DEX0488_024.nt.2 | 79700 | 10.0 | 10.0 | 22.2 | 22.2 | 0.0 | 0.0 |
| DEX0488_024.nt.2 | 79700.1 | 10.0 | 10.0 | 22.2 | 22.2 | 0.0 | 0.0 |
| DEX0488_025.nt.1 | 90527 | 0.0 | 0.0 | 0.0 | 0.0 | 0.0 | 0.0 |
| DEX0488_025.nt.1 | 90527.1 | 0.0 | 0.0 | 0.0 | 0.0 | 0.0 | 0.0 |
| DEX0488_025.nt.1 | 90528 | 15.0 | 15.0 | 33.3 | 33.3 | 0.0 | 0.0 |
| DEX0488_025.nt.1 | 90528.1 | 15.0 | 15.0 | 33.3 | 33.3 | 0.0 | 0.0 |
| DEX0488_025.nt.1 | 90543 | 0.0 | 0.0 | 0.0 | 0.0 | 0.0 | 0.0 |
| DEX0488_025.nt.1 | 90543.1 | 0.0 | 0.0 | 0.0 | 0.0 | 0.0 | 0.0 |
| DEX0488_025.nt.1 | 90544 | 15.0 | 15.0 | 33.3 | 33.3 | 0.0 | 0.0 |
| DEX0488_025.nt.1 | 90544.1 | 15.0 | 15.8 | 33.3 | 33.3 | 0.0 | 0.0 |
| DEX0488_025.nt.1 | 91047 | 0.0 | 0.0 | 0.0 | 0.0 | 0.0 | 0.0 |
| DEX0488_025.nt.1 | 91047.1 | 0.0 | 0.0 | 0.0 | 0.0 | 0.0 | 0.0 |
| DEX0488_025.nt.1 | 91048 | 0.0 | 0.0 | 0.0 | 0.0 | 0.0 | 0.0 |
| DEX0488_025.nt.1 | 91048.1 | 0.0 | 0.0 | 0.0 | 0.0 | 0.0 | 0.0 |
| DEX0488_025.nt.1 | 91051 | 0.0 | 0.0 | 0.0 | 0.0 | 0.0 | 0.0 |
| DEX0488_025.nt.1 | 91051.1 | 0.0 | 0.0 | 0.0 | 0.0 | 0.0 | 0.0 |
| DEX0488_025.nt.1 | 91052 | 0.0 | 0.0 | 0.0 | 0.0 | 0.0 | 0.0 |
| DEX0488_025.nt.1 | 91052.1 | 0.0 | 0.0 | 0.0 | 0.0 | 0.0 | 0.0 |
| DEX0488_025.nt.1 | 91055 | 0.0 | 0.0 | 0.0 | 0.0 | 0.0 | 0.0 |
| DEX0488_025.nt.1 | 91055.1 | 0.0 | 0.0 | 0.0 | 0.0 | 0.0 | 0.0 |
| DEX0488_025.nt.1 | 91056 | 0.0 | 0.0 | 0.0 | 0.0 | 0.0 | 0.0 |
| DEX0488_025.nt.1 | 91056.1 | 0.0 | 0.0 | 0.0 | 0.0 | 0.0 | 0.0 |
| DEX0488_025.nt.1 | 91171 | 0.0 | 0.0 | 0.0 | 0.0 | 0.0 | 0.0 |
| DEX0488_025.nt.1 | 91171.1 | 0.0 | 0.0 | 0.0 | 0.0 | 0.0 | 0.0 |
| DEX0488_025.nt.1 | 91172 | 10.0 | 10.5 | 22.2 | 25.0 | 0.0 | 0.0 |
| DEX0488_025.nt.1 | 91172.1 | 10.0 | 11.8 | 22.2 | 22.2 | 0.0 | 0.0 |
| DEX0488_025.nt.1 | 91271 | 0.0 | 0.0 | 0.0 | 0.0 | 0.0 | 0.0 |
| DEX0488_025.nt.1 | 91271.1 | 0.0 | 0.0 | 0.0 | 0.0 | 0.0 | 0.0 |
| DEX0488_025.nt.1 | 91272 | 5.0 | 5.0 | 11.1 | 11.1 | 0.0 | 0.0 |
| DEX0488_025.nt.1 | 91272.1 | 20.0 | 20.0 | 44.4 | 44.4 | 0.0 | 0.0 |
| DEX0488_025.nt.1 | 91275 | 0.0 | 0.0 | 0.0 | 0.0 | 0.0 | 0.0 |
| DEX0488_025.nt.1 | 91275.1 | 0.0 | 0.0 | 0.0 | 0.0 | 0.0 | 0.0 |
| DEX0488_025.nt.1 | 91276 | 10.0 | 10.0 | 22.2 | 22.2 | 0.0 | 0.0 |
| DEX0488_025.nt.1 | 91276.1 | 20.0 | 20.0 | 44.4 | 44.4 | 0.0 | 0.0 |
| DEX0488_025.nt.2 | 90528 | 15.0 | 15.0 | 33.3 | 33.3 | 0.0 | 0.0 |
| DEX0488_025.nt.2 | 90528.1 | 15.0 | 15.0 | 33.3 | 33.3 | 0.0 | 0.0 |
| DEX0488_025.nt.2 | 90544 | 15.0 | 15.0 | 33.3 | 33.3 | 0.0 | 0.0 |
| DEX0488_025.nt.2 | 90544.1 | 15.0 | 15.8 | 33.3 | 33.3 | 0.0 | 0.0 |
| DEX0488_025.nt.2 | 91172 | 10.0 | 10.5 | 22.2 | 25.0 | 0.0 | 0.0 |
| DEX0488_025.nt.2 | 91172.1 | 10.0 | 11.8 | 22.2 | 22.2 | 0.0 | 0.0 |
| DEX0488_025.nt.2 | 91272 | 5.0 | 5.0 | 11.1 | 11.1 | 0.0 | 0.0 |
| DEX0488_025.nt.2 | 91272.1 | 20.0 | 20.0 | 44.4 | 44.4 | 0.0 | 0.0 |
| DEX0488_025.nt.2 | 91276 | 10.0 | 10.0 | 22.2 | 22.2 | 0.0 | 0.0 |
| DEX0488_025.nt.2 | 91276.1 | 20.0 | 20.0 | 44.4 | 44.4 | 0.0 | 0.0 |
| DEX0488_026.nt.1 | 24160 | 5.0 | 33.3 | 0.0 | 0.0 | 9.1 | 100.0 |
| DEX0488_026.nt.1 | 24160.1 | 5.0 | 33.3 | 0.0 | 0.0 | 9.1 | 50.0 |
| DEX0488_026.nt.1 | 24160.2 | 5.0 | 33.3 | 0.0 | 0.0 | 9.1 | 50.0 |
| DEX0488_026.nt.1 | 24160.3 | 5.0 | 33.3 | 0.0 | 0.0 | 9.1 | 100.0 |
| DEX0488_026.nt.1 | 26816 | 5.0 | 33.3 | 0.0 | 0.0 | 9.1 | 100.0 |
| DEX0488_026.nt.1 | 26816.1 | 5.0 | 33.3 | 0.0 | 0.0 | 9.1 | 100.0 |
| DEX0488_027.nt.1 | 17852 | 5.0 | 20.0 | 11.1 | 33.3 | 0.0 | 0.0 |
| DEX0488_027.nt.1 | 17852.1 | 5.0 | 20.0 | 11.1 | 33.3 | 0.0 | 0.0 |
| DEX0488_027.nt.1 | 17853 | 10.0 | 50.0 | 22.2 | 66.7 | 0.0 | 0.0 |
| DEX0488_027.nt.1 | 17853.1 | 10.0 | 66.7 | 22.2 | 66.7 | 0.0 | 0.0 |
| DEX0488_027.nt.1 | 18644 | 5.0 | 16.7 | 11.1 | 33.3 | 0.0 | 0.0 |
| DEX0488_027.nt.1 | 18644.1 | 5.0 | 20.0 | 11.1 | 33.3 | 0.0 | 0.0 |
| DEX0488_027.nt.1 | 18644.2 | 5.0 | 20.0 | 11.1 | 33.3 | 0.0 | 0.0 |
| DEX0488_027.nt.1 | 18644.3 | 5.0 | 14.3 | 11.1 | 33.3 | 0.0 | 0.0 |
| DEX0488_027.nt.1 | 18645 | 5.0 | 33.3 | 11.1 | 33.3 | 0.0 | 0.0 |
| DEX0488_027.nt.1 | 18645.1 | 10.0 | 66.7 | 22.2 | 66.7 | 0.0 | 0.0 |
| DEX0488_027.nt.1 | 18645.2 | 10.0 | 66.7 | 22.2 | 66.7 | 0.0 | 0.0 |
| DEX0488_027.nt.1 | 18645.3 | 10.0 | 50.0 | 22.2 | 66.7 | 0.0 | 0.0 |
| DEX0488_027.nt.1 | 41955 | 5.0 | 25.0 | 11.1 | 33.3 | 0.0 | 0.0 |
| DEX0488_027.nt.1 | 41955.1 | 5.0 | 25.0 | 11.1 | 33.3 | 0.0 | 0.0 |
| DEX0488_027.nt.1 | 41955.2 | 5.0 | 33.3 | 11.1 | 33.3 | 0.0 | 0.0 |
| DEX0488_027.nt.1 | 41955.3 | 5.0 | 25.0 | 11.1 | 33.3 | 0.0 | 0.0 |
| DEX0488_027.nt.1 | 41955.4 | 5.0 | 25.0 | 11.1 | 33.3 | 0.0 | 0.0 |
| DEX0488_027.nt.1 | 41956 | 5.0 | 33.3 | 11.1 | 33.3 | 0.0 | 0.0 |
| DEX0488_027.nt.1 | 41956.1 | 5.0 | 33.3 | 11.1 | 50.0 | 0.0 | 0.0 |
| DEX0488_027.nt.1 | 41956.2 | 5.0 | 33.3 | 11.1 | 33.3 | 0.0 | 0.0 |
| DEX0488_027.nt.1 | 41956.3 | 5.0 | 33.3 | 11.1 | 33.3 | 0.0 | 0.0 |
| DEX0488_027.nt.1 | 41956.4 | 5.0 | 20.0 | 11.1 | 33.3 | 0.0 | 0.0 |
| DEX0488_027.nt.2 | 17852 | 5.0 | 20.0 | 11.1 | 33.3 | 0.0 | 0.0 |
| DEX0488_027.nt.2 | 17852.1 | 5.0 | 20.0 | 11.1 | 33.3 | 0.0 | 0.0 |
| DEX0488_027.nt.2 | 17853 | 10.0 | 50.0 | 22.2 | 66.7 | 0.0 | 0.0 |
| DEX0488_027.nt.2 | 17853.1 | 10.0 | 66.7 | 22.2 | 66.7 | 0.0 | 0.0 |
| DEX0488_027.nt.2 | 18644 | 5.0 | 16.7 | 11.1 | 33.3 | 0.0 | 0.0 |
| DEX0488_027.nt.2 | 18644.1 | 5.0 | 20.0 | 11.1 | 33.3 | 0.0 | 0.0 |
| DEX0488_027.nt.2 | 18644.2 | 5.0 | 20.0 | 11.1 | 33.3 | 0.0 | 0.0 |
| DEX0488_027.nt.2 | 18644.3 | 5.0 | 14.3 | 11.1 | 33.3 | 0.0 | 0.0 |
| DEX0488_027.nt.2 | 18645 | 5.0 | 33.3 | 11.1 | 33.3 | 0.0 | 0.0 |
| DEX0488_027.nt.2 | 18645.1 | 10.0 | 66.7 | 22.2 | 66.7 | 0.0 | 0.0 |
| DEX0488_027.nt.2 | 18645.2 | 10.0 | 66.7 | 22.2 | 66.7 | 0.0 | 0.0 |
| DEX0488_027.nt.2 | 18645.3 | 10.0 | 50.0 | 22.2 | 66.7 | 0.0 | 0.0 |
| DEX0488_027.nt.3 | 17852 | 5.0 | 20.0 | 11.1 | 33.3 | 0.0 | 0.0 |
| DEX0488_027.nt.3 | 17852.1 | 5.0 | 20.0 | 11.1 | 33.3 | 0.0 | 0.0 |
| DEX0488_027.nt.3 | 17853 | 10.0 | 50.0 | 22.2 | 66.7 | 0.0 | 0.0 |
| DEX0488_027.nt.3 | 17853.1 | 10.0 | 66.7 | 22.2 | 66.7 | 0.0 | 0.0 |
| DEX0488_027.nt.3 | 18644 | 5.0 | 16.7 | 11.1 | 33.3 | 0.0 | 0.0 |
| DEX0488_027.nt.3 | 18644.1 | 5.0 | 20.0 | 11.1 | 33.3 | 0.0 | 0.0 |
| DEX0488_027.nt.3 | 18644.2 | 5.0 | 20.0 | 11.1 | 33.3 | 0.0 | 0.0 |
| DEX0488_027.nt.3 | 18644.3 | 5.0 | 14.3 | 11.1 | 33.3 | 0.0 | 0.0 |
| DEX0488_027.nt.3 | 18645 | 5.0 | 33.3 | 11.1 | 33.3 | 0.0 | 0.0 |
| DEX0488_027.nt.3 | 18645.1 | 10.0 | 66.7 | 22.2 | 66.7 | 0.0 | 0.0 |
| DEX0488_027.nt.3 | 18645.2 | 10.0 | 66.7 | 22.2 | 66.7 | 0.0 | 0.0 |
| DEX0488_027.nt.3 | 18645.3 | 10.0 | 50.0 | 22.2 | 66.7 | 0.0 | 0.0 |
| DEX0488_027.nt.4 | 17852 | 5.0 | 20.0 | 11.1 | 33.3 | 0.0 | 0.0 |
| DEX0488_027.nt.4 | 17852.1 | 5.0 | 20.0 | 11.1 | 33.3 | 0.0 | 0.0 |
| DEX0488_027.nt.4 | 17853 | 10.0 | 50.0 | 22.2 | 66.7 | 0.0 | 0.0 |
| DEX0488_027.nt.4 | 17853.1 | 10.0 | 66.7 | 22.2 | 66.7 | 0.0 | 0.0 |
| DEX0488_027.nt.4 | 18644 | 5.0 | 16.7 | 11.1 | 33.3 | 0.0 | 0.0 |
| DEX0488_027.nt.4 | 18644.1 | 5.0 | 20.0 | 11.1 | 33.3 | 0.0 | 0.0 |
| DEX0488_027.nt.4 | 18644.2 | 5.0 | 20.0 | 11.1 | 33.3 | 0.0 | 0.0 |
| DEX0488_027.nt.4 | 18644.3 | 5.0 | 14.3 | 11.1 | 33.3 | 0.0 | 0.0 |
| DEX0488_027.nt.4 | 18645 | 5.0 | 33.3 | 11.1 | 33.3 | 0.0 | 0.0 |
| DEX0488_027.nt.4 | 18645.1 | 10.0 | 66.7 | 22.2 | 66.7 | 0.0 | 0.0 |
| DEX0488_027.nt.4 | 18645.2 | 10.0 | 66.7 | 22.2 | 66.7 | 0.0 | 0.0 |
| DEX0488_027.nt.4 | 18645.3 | 10.0 | 50.0 | 22.2 | 66.7 | 0.0 | 0.0 |
| DEX0488_028.nt.1 | 33088 | 70.0 | 73.7 | 55.6 | 62.5 | 81.8 | 81.8 |
| DEX0488_028.nt.1 | 33088.1 | 70.0 | 77.8 | 55.6 | 71.4 | 81.8 | 81.8 |
| DEX0488_028.nt.1 | 33088.2 | 70.0 | 77.8 | 55.6 | 71.4 | 81.8 | 81.8 |
| DEX0488_028.nt.1 | 33088.3 | 70.0 | 77.8 | 55.6 | 71.4 | 81.8 | 81.8 |
| DEX0488_029.nt.1 | 79635 | 75.0 | 75.0 | 77.8 | 77.8 | 72.7 | 72.7 |
| DEX0488_029.nt.1 | 79635.1 | 80.0 | 80.0 | 77.8 | 77.8 | 81.8 | 81.8 |
| DEX0488_030.nt.1 | 35317 | 5.0 | 14.3 | 11.1 | 25.0 | 0.0 | 0.0 |
| DEX0488_030.nt.1 | 35317.1 | 5.0 | 20.0 | 11.1 | 33.3 | 0.0 | 0.0 |
| DEX0488_031.nt.1 | 78587 | 30.0 | 30.0 | 44.4 | 44.4 | 18.2 | 18.2 |
| DEX0488_031.nt.1 | 78587.1 | 30.0 | 30.0 | 44.4 | 44.4 | 18.2 | 18.2 |
| DEX0488_031.nt.1 | 78588 | 35.0 | 35.0 | 44.4 | 44.4 | 27.3 | 27.3 |
| DEX0488_031.nt.1 | 78588.1 | 30.0 | 30.0 | 44.4 | 44.4 | 18.2 | 18.2 |
| DEX0488_032.nt.1 | 78711 | 5.0 | 5.0 | 0.0 | 0.0 | 9.1 | 9.1 |
| DEX0488_032.nt.1 | 78711.1 | 5.0 | 5.0 | 0.0 | 0.0 | 9.1 | 9.1 |
| DEX0488_032.nt.1 | 78712 | 5.0 | 5.0 | 0.0 | 0.0 | 9.1 | 9.1 |
| DEX0488_032.nt.1 | 78712.1 | 5.0 | 5.0 | 0.0 | 0.0 | 9.1 | 9.1 |
| DEX0488_033.nt.1 | 79019 | 0.0 | 0.0 | 0.0 | 0.0 | 0.0 | 0.0 |
| DEX0488_033.nt.1 | 79019.1 | 5.0 | 5.6 | 11.1 | 12.5 | 0.0 | 0.0 |
| DEX0488_033.nt.1 | 79020 | 5.0 | 5.0 | 11.1 | 11.1 | 0.0 | 0.0 |
| DEX0488_033.nt.1 | 79020.1 | 5.0 | 5.0 | 11.1 | 11.1 | 0.0 | 0.0 |
| DEX0488_033.nt.2 | 79019 | 0.0 | 0.0 | 0.0 | 0.0 | 0.0 | 0.0 |
| DEX0488_033.nt.2 | 79019.1 | 5.0 | 5.6 | 11.1 | 12.5 | 0.0 | 0.0 |
| DEX0488_033.nt.2 | 79020 | 5.0 | 5.0 | 11.1 | 11.1 | 0.0 | 0.0 |
| DEX0488_033.nt.2 | 79020.1 | 5.0 | 5.0 | 11.1 | 11.1 | 0.0 | 0.0 |
| DEX0488_034.nt.1 | 90123 | 0.0 | 0.0 | 0.0 | 0.0 | 0.0 | 0.0 |
| DEX0488_034.nt.1 | 90123.1 | 0.0 | 0.0 | 0.0 | 0.0 | 0.0 | 0.0 |
| DEX0488_034.nt.1 | 90124 | 0.0 | 0.0 | 0.0 | 0.0 | 0.0 | 0.0 |
| DEX0488_034.nt.1 | 90124.1 | 0.0 | 0.0 | 0.0 | 0.0 | 0.0 | 0.0 |
| DEX0488_035.nt.1 | 79903 | 5.0 | 5.0 | 0.0 | 0.0 | 9.1 | 9.1 |
| DEX0488_035.nt.1 | 79903.1 | 5.0 | 5.0 | 0.0 | 0.0 | 9.1 | 9.1 |
| DEX0488_035.nt.1 | 79904 | 10.0 | 10.0 | 0.0 | 0.0 | 18.2 | 18.2 |
| DEX0488_035.nt.1 | 79904.1 | 10.0 | 10.5 | 0.0 | 0.0 | 18.2 | 20.0 |
| DEX0488_035.nt.2 | 79903 | 5.0 | 5.0 | 0.0 | 0.0 | 9.1 | 9.1 |
| DEX0488_035.nt.2 | 79903.1 | 5.0 | 5.0 | 0.0 | 0.0 | 9.1 | 9.1 |
| DEX0488_035.nt.2 | 79904 | 10.0 | 10.0 | 0.0 | 0.0 | 18.2 | 18.2 |
| DEX0488_035.nt.2 | 79904.1 | 10.0 | 10.5 | 0.0 | 0.0 | 18.2 | 20.0 |
| DEX0488_036.nt.1 | 3976 | 0.0 | 0.0 | 0.0 | 0.0 | 0.0 | 0.0 |
| DEX0488_036.nt.1 | 3976.1 | 0.0 | 0.0 | 0.0 | 0.0 | 0.0 | 0.0 |
| DEX0488_036.nt.1 | 3977 | 0.0 | 0.0 | 0.0 | 0.0 | 0.0 | 0.0 |
| DEX0488_036.nt.1 | 3977.1 | 0.0 | 0.0 | 0.0 | 0.0 | 0.0 | 0.0 |
| DEX0488_036.nt.2 | 3976 | 0.0 | 0.0 | 0.0 | 0.0 | 0.0 | 0.0 |
| DEX0488_036.nt.2 | 3976.1 | 0.0 | 0.0 | 0.0 | 0.0 | 0.0 | 0.0 |
| DEX0488_036.nt.2 | 3977 | 0.0 | 0.0 | 0.0 | 0.0 | 0.0 | 0.0 |
| DEX0488_036.nt.2 | 3977.1 | 0.0 | 0.0 | 0.0 | 0.0 | 0.0 | 0.0 |

[0512] Lung Cancer Chips

[0513] For lung cancer two different chip designs were evaluated with overlapping sets of a total of 29 samples, comparing the expression patterns of lung cancer derived polyA+ RNA to polyA+ RNA isolated from a pool of 12 normal lung tissues. For the Lung Array Chip all 29 samples (15 squamous cell carcinomas and 14 adenocarcinomas including 14 stage I and 15 stage II/III cancers) were analyzed. For the Multi-Cancer Array Chip a subset of 22 of these samples (10 squamous cell carcinomas, 12 adenocarcinomas) were assessed. In addition to tissue samples, five lung cancer cell lines (CA549, CH522, CH226, CH2170, CSHP77) were analyzed on the Lung Array Chip.

[0514] The results for the statistically significant up-regulated genes on the Lung Array Chip are shown in Table(s) 19-21. The results for the statistically significant up-regulated genes on the Multi-Cancer Array Chip are shown in Table(s) 22-23. The first two columns of each table contain information about the sequence itself (DEX ID, Oligo Name), the next columns show the results obtained for all (“ALL”) lung cancer samples, squamous cell carcinomas (“SQ”), adenocarcinomas (“AD”), or cancers corresponding to stage I (“ST1”), or stages II and III (“ST2,3”). ‘% up’ indicates the percentage of all experiments in which up-regulation of at least 2-fold was observed (n=29 for Lung Array Chip, n=22 for Multi-Cancer Array Chip), ‘% valid up’ indicates the percentage of experiments with valid expression values in which up-regulation of at least 2-fold was observed. For the cell lines, ‘% up’ indicates the percentage of all experiments in which up-regulation of at least 1.8-fold was observed (n=5 for Lung Array Chip), ‘% valid up’ indicates the percentage of experiments with valid expression values in which up-regulation of at least 1.8-fold was observed.

TABLE 19

| | | | Lng | | Lng | | Lng | | Lng | | Lng |
|---|---|---|---|---|---|---|---|---|---|---|---|
| | | Lng | ALL % | Lng | SQ % | Lng | AD % | Lng | ST1 % | Lng | ST2, 3 % |
| | | ALL | valid | SQ | valid | AD | valid | ST1 | valid | ST2, 3 | valid |
| | Oligo | % up | up | % up | up | % up | up | % up | up | % up | up |
| DEX ID | Name | n = 29 | n = 29 | n = 15 | n = 15 | n = 14 | n = 14 | n = 14 | n = 14 | n = 15 | n = 15 |
| DEX0488_{—} | 1202 | 0.0 | 0.0 | 0.0 | 0.0 | 0.0 | 0.0 | 0.0 | 0.0 | 0.0 | 0.0 |
| 006.nt.1 | | | | | | | | | | | |
| DEX0488_{—} | 1203 | 0.0 | 0.0 | 0.0 | 0.0 | 0.0 | 0.0 | 0.0 | 0.0 | 0.0 | 0.0 |
| 006.nt.1 | | | | | | | | | | | |
| DEX0488_{—} | 4353 | 0.0 | 0.0 | 0.0 | 0.0 | 0.0 | 0.0 | 0.0 | 0.0 | 0.0 | 0.0 |
| 006.nt.1 | | | | | | | | | | | |
| DEX0488_{—} | 41955 | 10.3 | 11.5 | 6.7 | 7.7 | 14.3 | 15.4 | 14.3 | 15.4 | 6.7 | 7.7 |
| 007.nt.1 | | | | | | | | | | | |
| DEX0488_{—} | 41956 | 10.3 | 11.1 | 6.7 | 7.1 | 14.3 | 15.4 | 14.3 | 14.3 | 6.7 | 7.7 |
| 007.nt.1 | | | | | | | | | | | |
| DEX0488_{—} | 2084 | 10.3 | 10.3 | 0.0 | 0.0 | 21.4 | 21.4 | 14.3 | 14.3 | 6.7 | 6.7 |
| 008.nt.1 | | | | | | | | | | | |
| DEX0488_{—} | 4909 | 10.3 | 10.3 | 0.0 | 0.0 | 21.4 | 21.4 | 14.3 | 14.3 | 6.7 | 6.7 |
| 008.nt.1 | | | | | | | | | | | |
| DEX0488_{—} | 4910 | 10.3 | 10.3 | 0.0 | 0.0 | 21.4 | 21.4 | 14.3 | 14.3 | 6.7 | 6.7 |
| 008.nt.1 | | | | | | | | | | | |
| DEX0488_{—} | 2084 | 10.3 | 10.3 | 0.0 | 0.0 | 21.4 | 21.4 | 14.3 | 14.3 | 6.7 | 6.7 |
| 008.nt.2 | | | | | | | | | | | |
| DEX0488_{—} | 4909 | 10.3 | 10.3 | 0.0 | 0.0 | 21.4 | 21.4 | 14.3 | 14.3 | 6.7 | 6.7 |
| 008.nt.2 | | | | | | | | | | | |
| DEX0488_{—} | 4910 | 10.3 | 10.3 | 0.0 | 0.0 | 21.4 | 21.4 | 14.3 | 14.3 | 6.7 | 6.7 |
| 008.nt.2 | | | | | | | | | | | |
| DEX0488_{—} | 39927 | 82.8 | 85.7 | 93.3 | 100.0 | 71.4 | 71.4 | 71.4 | 76.9 | 93.3 | 93.3 |
| 011.nt.1 | | | | | | | | | | | |
| DEX0488_{—} | 39927.2 | 82.8 | 82.8 | 93.3 | 93.3 | 71.4 | 71.4 | 71.4 | 71.4 | 93.3 | 93.3 |
| 011.nt.1 | | | | | | | | | | | |
| DEX0488_{—} | 39928 | 69.0 | 71.4 | 80.0 | 80.0 | 57.1 | 61.5 | 64.3 | 64.3 | 73.3 | 78.6 |
| 011.nt.1 | | | | | | | | | | | |
| DEX0488_{—} | 39928.2 | 72.4 | 72.4 | 86.7 | 86.7 | 57.1 | 57.1 | 71.4 | 71.4 | 73.3 | 73.3 |
| 011.nt.1 | | | | | | | | | | | |
| DEX0488_{—} | 21187 | 13.8 | 14.3 | 6.7 | 6.7 | 21.4 | 23.1 | 14.3 | 14.3 | 13.3 | 14.3 |
| 012.nt.1 | | | | | | | | | | | |
| DEX0488_{—} | 21187.2 | 13.8 | 14.3 | 6.7 | 6.7 | 21.4 | 23.1 | 14.3 | 14.3 | 13.3 | 14.3 |
| 012.nt.1 | | | | | | | | | | | |
| DEX0488_{—} | 1202 | 0.0 | 0.0 | 0.0 | 0.0 | 0.0 | 0.0 | 0.0 | 0.0 | 0.0 | 0.0 |
| 017.nt.1 | | | | | | | | | | | |
| DEX0488_{—} | 1203 | 0.0 | 0.0 | 0.0 | 0.0 | 0.0 | 0.0 | 0.0 | 0.0 | 0.0 | 0.0 |
| 017.nt.1 | | | | | | | | | | | |
| DEX0488_{—} | 4353 | 0.0 | 0.0 | 0.0 | 0.0 | 0.0 | 0.0 | 0.0 | 0.0 | 0.0 | 0.0 |
| 017.nt.1 | | | | | | | | | | | |
| DEX0488_{—} | 21187 | 13.8 | 14.3 | 6.7 | 6.7 | 21.4 | 23.1 | 14.3 | 14.3 | 13.3 | 14.3 |
| 021.nt.1 | | | | | | | | | | | |
| DEX0488_{—} | 21187.2 | 13.8 | 14.3 | 6.7 | 6.7 | 21.4 | 23.1 | 14.3 | 14.3 | 13.3 | 14.3 |
| 021.nt.1 | | | | | | | | | | | |
| DEX0488_{—} | 21187 | 13.8 | 14.3 | 6.7 | 6.7 | 21.4 | 23.1 | 14.3 | 14.3 | 13.3 | 14.3 |
| 021.nt.2 | | | | | | | | | | | |
| DEX0488_{—} | 21187.2 | 13.8 | 14.3 | 6.7 | 6.7 | 21.4 | 23.1 | 14.3 | 14.3 | 13.3 | 14.3 |
| 021.nt.2 | | | | | | | | | | | |
| DEX0488_{—} | 24160 | 0.0 | 0.0 | 0.0 | 0.0 | 0.0 | 0.0 | 0.0 | 0.0 | 0.0 | 0.0 |
| 026.nt.1 | | | | | | | | | | | |
| DEX0488_{—} | 24160.2 | 0.0 | 0.0 | 0.0 | 0.0 | 0.0 | 0.0 | 0.0 | 0.0 | 0.0 | 0.0 |
| 026.nt.1 | | | | | | | | | | | |
| DEX0488_{—} | 18645 | 13.8 | 15.4 | 6.7 | 7.7 | 21.4 | 23.1 | 21.4 | 25.0 | 6.7 | 7.1 |
| 027.nt.1 | | | | | | | | | | | |
| DEX0488_{—} | 18645.2 | 10.3 | 10.7 | 6.7 | 6.7 | 14.3 | 15.4 | 14.3 | 14.3 | 6.7 | 7.1 |
| 027.nt.1 | | | | | | | | | | | |
| DEX0488_{—} | 41955 | 10.3 | 11.5 | 6.7 | 7.7 | 14.3 | 15.4 | 14.3 | 15.4 | 6.7 | 7.7 |
| 027.nt.1 | | | | | | | | | | | |
| DEX0488_{—} | 41956 | 10.3 | 11.1 | 6.7 | 7.1 | 14.3 | 15.4 | 14.3 | 14.3 | 6.7 | 7.7 |
| 027.nt.1 | | | | | | | | | | | |
| DEX0488_{—} | 18645 | 13.8 | 15.4 | 6.7 | 7.7 | 21.4 | 23.1 | 21.4 | 25.0 | 6.7 | 7.1 |
| 027.nt.2 | | | | | | | | | | | |
| DEX0488_{—} | 18645.2 | 10.3 | 10.7 | 6.7 | 6.7 | 14.3 | 15.4 | 14.3 | 14.3 | 6.7 | 7.1 |
| 027.nt.2 | | | | | | | | | | | |
| DEX0488_{—} | 18645 | 13.8 | 15.4 | 6.7 | 7.7 | 21.4 | 23.1 | 21.4 | 25.0 | 6.7 | 7.1 |
| 027.nt.3 | | | | | | | | | | | |
| DEX0488_{—} | 18645.2 | 10.3 | 10.7 | 6.7 | 6.7 | 14.3 | 15.4 | 14.3 | 14.3 | 6.7 | 7.1 |
| 027.nt.3 | | | | | | | | | | | |
| DEX0488_{—} | 18645 | 13.8 | 15.4 | 6.7 | 7.7 | 21.4 | 23.1 | 21.4 | 25.0 | 6.7 | 7.1 |
| 027.nt.4 | | | | | | | | | | | |
| DEX0488_{—} | 18645.2 | 10.3 | 10.7 | 6.7 | 6.7 | 14.3 | 15.4 | 14.3 | 14.3 | 6.7 | 7.1 |
| 027.nt.4 | | | | | | | | | | | |
| DEX0488_{—} | 33088 | 27.6 | 27.6 | 6.7 | 6.7 | 50.0 | 50.0 | 35.7 | 35.7 | 20.0 | 20.0 |
| 028.nt.1 | | | | | | | | | | | |
| DEX0488_{—} | 33088.2 | 27.6 | 27.6 | 6.7 | 6.7 | 50.0 | 50.0 | 35.7 | 35.7 | 20.0 | 20.0 |
| 028.nt.1 | | | | | | | | | | | |
| DEX0488_{—} | 3976 | 0.0 | 0.0 | 0.0 | 0.0 | 0.0 | 0.0 | 0.0 | 0.0 | 0.0 | 0.0 |
| 036.nt.1 | | | | | | | | | | | |
| DEX0488_{—} | 3977 | 0.0 | 0.0 | 0.0 | 0.0 | 0.0 | 0.0 | 0.0 | 0.0 | 0.0 | 0.0 |
| 036.nt.1 | | | | | | | | | | | |
| DEX0488_{—} | 3976 | 0.0 | 0.0 | 0.0 | 0.0 | 0.0 | 0.0 | 0.0 | 0.0 | 0.0 | 0.0 |
| 036.nt.2 | | | | | | | | | | | |
| DEX0488_{—} | 3977 | 0.0 | 0.0 | 0.0 | 0.0 | 0.0 | 0.0 | 0.0 | 0.0 | 0.0 | 0.0 |
| 036.nt.2 | | | | | | | | | | | |

[0515] TABLE 20

| | | | Lng | | Lng | | Lng | | Lng | | Lng |
|---|---|---|---|---|---|---|---|---|---|---|---|
| | | Lng | 550 | Lng | 550 | Lng | 550 | Lng | 550 | Lng | 550 |
| | | 550 | ALL % | 550 | SQ % | 550 | AD % | 550 | ST1 % | 550 | ST2, 3 % |
| | | ALL | valid | SQ | valid | AD | valid | ST1 | valid | ST2, 3 | valid |
| | Oligo | % up | up | % up | up | % up | up | % up | up | % up | up |
| DEX ID | Name | n = 26 | n = 26 | n = 12 | n = 12 | n = 14 | n = 14 | n = 11 | n = 11 | n = 15 | n = 15 |
| DEX0488_{—} | 1202 | 38.5 | 55.6 | 16.7 | 40.0 | 57.1 | 61.5 | 63.6 | 77.8 | 20.0 | 33.3 |
| 006.nt.1 | | | | | | | | | | | |
| DEX0488_{—} | 1203 | 53.8 | 66.7 | 50.0 | 75.0 | 57.1 | 61.5 | 81.8 | 90.0 | 33.3 | 45.5 |
| 006.nt.1 | | | | | | | | | | | |
| DEX0488_{—} | 4353 | 42.3 | 55.0 | 33.3 | 57.1 | 50.0 | 53.8 | 63.6 | 70.0 | 26.7 | 40.0 |
| 006.nt.1 | | | | | | | | | | | |
| DEX0488_{—} | 41955 | 11.5 | 14.3 | 8.3 | 10.0 | 14.3 | 18.2 | 18.2 | 20.0 | 6.7 | 9.1 |
| 007.nt.1 | | | | | | | | | | | |
| DEX0488_{—} | 41956 | 11.5 | 13.0 | 8.3 | 10.0 | 14.3 | 15.4 | 18.2 | 18.2 | 6.7 | 8.3 |
| 007.nt.1 | | | | | | | | | | | |
| DEX0488_{—} | 2084 | 11.5 | 11.5 | 0.0 | 0.0 | 21.4 | 21.4 | 18.2 | 18.2 | 6.7 | 6.7 |
| 008.nt.1 | | | | | | | | | | | |
| DEX0488_{—} | 4909 | 11.5 | 11.5 | 0.0 | 0.0 | 21.4 | 21.4 | 18.2 | 18.2 | 6.7 | 6.7 |
| 008.nt.1 | | | | | | | | | | | |
| DEX0488_{—} | 4910 | 11.5 | 11.5 | 0.0 | 0.0 | 21.4 | 21.4 | 18.2 | 18.2 | 6.7 | 6.7 |
| 008.nt.1 | | | | | | | | | | | |
| DEX0488_{—} | 2084 | 11.5 | 11.5 | 0.0 | 0.0 | 21.4 | 21.4 | 18.2 | 18.2 | 6.7 | 6.7 |
| 008.nt.2 | | | | | | | | | | | |
| DEX0488_{—} | 4909 | 11.5 | 11.5 | 0.0 | 0.0 | 21.4 | 21.4 | 18.2 | 18.2 | 6.7 | 6.7 |
| 008.nt.2 | | | | | | | | | | | |
| DEX0488_{—} | 4910 | 11.5 | 11.5 | 0.0 | 0.0 | 21.4 | 21.4 | 18.2 | 18.2 | 6.7 | 6.7 |
| 008.nt.2 | | | | | | | | | | | |
| DEX0488_{—} | 39927 | 76.9 | 80.0 | 83.3 | 90.9 | 71.4 | 71.4 | 54.5 | 60.0 | 93.3 | 93.3 |
| 011.nt.1 | | | | | | | | | | | |
| DEX0488_{—} | 39927.2 | 80.8 | 80.8 | 91.7 | 91.7 | 71.4 | 71.4 | 63.6 | 63.6 | 93.3 | 93.3 |
| 011.nt.1 | | | | | | | | | | | |
| DEX0488_{—} | 39928 | 61.5 | 66.7 | 83.3 | 83.3 | 42.9 | 50.0 | 54.5 | 60.0 | 66.7 | 71.4 |
| 011.nt.1 | | | | | | | | | | | |
| DEX0488_{—} | 39928.2 | 73.1 | 73.1 | 91.7 | 91.7 | 57.1 | 57.1 | 63.6 | 63.6 | 80.0 | 80.0 |
| 011.nt.1 | | | | | | | | | | | |
| DEX0488_{—} | 21187 | 15.4 | 16.7 | 8.3 | 9.1 | 21.4 | 23.1 | 18.2 | 20.0 | 13.3 | 14.3 |
| 012.nt.1 | | | | | | | | | | | |
| DEX0488_{—} | 21187.2 | 15.4 | 16.7 | 8.3 | 9.1 | 21.4 | 23.1 | 18.2 | 20.0 | 13.3 | 14.3 |
| 012.nt.1 | | | | | | | | | | | |
| DEX0488_{—} | 1202 | 38.5 | 55.6 | 16.7 | 40.0 | 57.1 | 61.5 | 63.6 | 77.8 | 20.0 | 33.3 |
| 017.nt.1 | | | | | | | | | | | |
| DEX0488_{—} | 1203 | 53.8 | 66.7 | 50.0 | 75.0 | 57.1 | 61.5 | 81.8 | 90.0 | 33.3 | 45.5 |
| 017.nt.1 | | | | | | | | | | | |
| DEX0488_{—} | 4353 | 42.3 | 55.0 | 33.3 | 57.1 | 50.0 | 53.8 | 63.6 | 70.0 | 26.7 | 40.0 |
| 017.nt.1 | | | | | | | | | | | |
| DEX0488_{—} | 21187 | 15.4 | 16.7 | 8.3 | 9.1 | 21.4 | 23.1 | 18.2 | 20.0 | 13.3 | 14.3 |
| 021.nt.1 | | | | | | | | | | | |
| DEX0488_{—} | 21187.2 | 15.4 | 16.7 | 8.3 | 9.1 | 21.4 | 23.1 | 18.2 | 20.0 | 13.3 | 14.3 |
| 021.nt.1 | | | | | | | | | | | |
| DEX0488_{—} | 21187 | 15.4 | 16.7 | 8.3 | 9.1 | 21.4 | 23.1 | 18.2 | 20.0 | 13.3 | 14.3 |
| 021.nt.2 | | | | | | | | | | | |
| DEX0488_{—} | 21187.2 | 15.4 | 16.7 | 8.3 | 9.1 | 21.4 | 23.1 | 18.2 | 20.0 | 13.3 | 14.3 |
| 021.nt.2 | | | | | | | | | | | |
| DEX0488_{—} | 24160 | 0.0 | 0.0 | 0.0 | 0.0 | 0.0 | 0.0 | 0.0 | 0.0 | 0.0 | 0.0 |
| 026.nt.1 | | | | | | | | | | | |
| DEX0488_{—} | 24160.2 | 0.0 | 0.0 | 0.0 | 0.0 | 0.0 | 0.0 | 0.0 | 0.0 | 0.0 | 0.0 |
| 026.nt.1 | | | | | | | | | | | |
| DEX0488_{—} | 18645 | 11.5 | 14.3 | 8.3 | 11.1 | 14.3 | 16.7 | 18.2 | 18.2 | 6.7 | 10.0 |
| 027.nt.1 | | | | | | | | | | | |
| DEX0488_{—} | 18645.2 | 11.5 | 15.0 | 8.3 | 11.1 | 14.3 | 18.2 | 18.2 | 18.2 | 6.7 | 11.1 |
| 027.nt.1 | | | | | | | | | | | |
| DEX0488_{—} | 41955 | 11.5 | 14.3 | 8.3 | 10.0 | 14.3 | 18.2 | 18.2 | 20.0 | 6.7 | 9.1 |
| 027.nt.1 | | | | | | | | | | | |
| DEX0488_{—} | 41956 | 11.5 | 13.0 | 8.3 | 10.0 | 14.3 | 15.4 | 18.2 | 18.2 | 6.7 | 8.3 |
| 027.nt.1 | | | | | | | | | | | |
| DEX0488_{—} | 18645 | 11.5 | 14.3 | 8.3 | 11.1 | 14.3 | 16.7 | 18.2 | 18.2 | 6.7 | 10.0 |
| 027.nt.2 | | | | | | | | | | | |
| DEX0488_{—} | 18645.2 | 11.5 | 15.0 | 8.3 | 11.1 | 14.3 | 18.2 | 18.2 | 18.2 | 6.7 | 11.1 |
| 027.nt.2 | | | | | | | | | | | |
| DEX0488_{—} | 18645 | 11.5 | 14.3 | 8.3 | 11.1 | 14.3 | 16.7 | 18.2 | 18.2 | 6.7 | 10.0 |
| 027.nt.3 | | | | | | | | | | | |
| DEX0488_{—} | 18645.2 | 11.5 | 15.0 | 8.3 | 11.1 | 14.3 | 18.2 | 18.2 | 18.2 | 6.7 | 11.1 |
| 027.nt.3 | | | | | | | | | | | |
| DEX0488_{—} | 18645 | 11.5 | 14.3 | 8.3 | 11.1 | 14.3 | 16.7 | 18.2 | 18.2 | 6.7 | 10.0 |
| 027.nt.4 | | | | | | | | | | | |
| DEX0488_{—} | 18645.2 | 11.5 | 15.0 | 8.3 | 11.1 | 14.3 | 18.2 | 18.2 | 18.2 | 6.7 | 11.1 |
| 027.nt.4 | | | | | | | | | | | |
| DEX0488_{—} | 33088 | 30.8 | 30.8 | 8.3 | 8.3 | 50.0 | 50.0 | 45.5 | 45.5 | 20.0 | 20.0 |
| 028.nt.1 | | | | | | | | | | | |
| DEX0488_{—} | 33088.2 | 30.8 | 30.8 | 8.3 | 8.3 | 50.0 | 50.0 | 45.5 | 45.5 | 20.0 | 20.0 |
| 028.nt.1 | | | | | | | | | | | |
| DEX0488_{—} | 3976 | 0.0 | 0.0 | 0.0 | 0.0 | 0.0 | 0.0 | 0.0 | 0.0 | 0.0 | 0.0 |
| 036.nt.1 | | | | | | | | | | | |
| DEX0488_{—} | 3977 | 0.0 | 0.0 | 0.0 | 0.0 | 0.0 | 0.0 | 0.0 | 0.0 | 0.0 | 0.0 |
| 036.nt.1 | | | | | | | | | | | |
| DEX0488_{—} | 3976 | 0.0 | 0.0 | 0.0 | 0.0 | 0.0 | 0.0 | 0.0 | 0.0 | 0.0 | 0.0 |
| 036.nt.2 | | | | | | | | | | | |
| DEX0488_{—} | 3977 | 0.0 | 0.0 | 0.0 | 0.0 | 0.0 | 0.0 | 0.0 | 0.0 | 0.0 | 0.0 |
| 036.nt.2 | | | | | | | | | | | |

[0516] TABLE 21

| | | Lng Cell | Lng Cell | Lng Cell | Lng Cell Lines |
|---|---|---|---|---|---|
| | Oligo | Lines % up | Lines % valid | Lines PMT | PMT 550 % valid |
| DEX ID | Name | n = 5 | up n = 5 | 550 % up n = 5 | up n = 5 |
| DEX0488_006.nt.1 | 1202 | 0.0 | 0.0 | 0.0 | 0.0 |
| DEX0488_006.nt.1 | 1203 | 0.0 | 0.0 | 0.0 | 0.0 |
| DEX0488_006.nt.1 | 4353 | 0.0 | 0.0 | 0.0 | 0.0 |
| DEX0488_007.nt.1 | 41955 | 0.0 | 0.0 | 0.0 | 0.0 |
| DEX0488_007.nt.1 | 41956 | 0.0 | 0.0 | 0.0 | 0.0 |
| DEX0488_008.nt.1 | 2084 | 20.0 | 20.0 | 20.0 | 20.0 |
| DEX0488_008.nt.1 | 4909 | 20.0 | 20.0 | 20.0 | 33.3 |
| DEX0488_008.nt.1 | 4910 | 20.0 | 20.0 | 20.0 | 20.0 |
| DEX0488_008.nt.2 | 2084 | 20.0 | 20.0 | 20.0 | 20.0 |
| DEX0488_008.nt.2 | 4909 | 20.0 | 20.0 | 20.0 | 33.3 |
| DEX0488_008.nt.2 | 4910 | 20.0 | 20.0 | 20.0 | 20.0 |
| DEX0488_011.nt.1 | 39927 | 80.0 | 80.0 | 100.0 | 100.0 |
| DEX0488_011.nt.1 | 39927.2 | 80.0 | 80.0 | 100.0 | 100.0 |
| DEX0488_011.nt.1 | 39928 | 80.0 | 80.0 | 80.0 | 80.0 |
| DEX0488_011.nt.1 | 39928.2 | 80.0 | 80.0 | 100.0 | 100.0 |
| DEX0488_012.nt.1 | 21187 | 0.0 | 0.0 | 0.0 | 0.0 |
| DEX0488_012.nt.1 | 21187.2 | 0.0 | 0.0 | 0.0 | 0.0 |
| DEX0488_017.nt.1 | 1202 | 0.0 | 0.0 | 0.0 | 0.0 |
| DEX0488_017.nt.1 | 1203 | 0.0 | 0.0 | 0.0 | 0.0 |
| DEX0488_017.nt.1 | 4353 | 0.0 | 0.0 | 0.0 | 0.0 |
| DEX0488_021.nt.1 | 21187 | 0.0 | 0.0 | 0.0 | 0.0 |
| DEX0488_021.nt.1 | 21187.2 | 0.0 | 0.0 | 0.0 | 0.0 |
| DEX0488_021.nt.2 | 21187 | 0.0 | 0.0 | 0.0 | 0.0 |
| DEX0488_021.nt.2 | 21187.2 | 0.0 | 0.0 | 0.0 | 0.0 |
| DEX0488_026.nt.1 | 24160 | 0.0 | 0.0 | 0.0 | 0.0 |
| DEX0488_026.nt.1 | 24160.2 | 0.0 | 0.0 | 0.0 | 0.0 |
| DEX0488_027.nt.1 | 18645 | 0.0 | 0.0 | 0.0 | 0.0 |
| DEX0488_027.nt.1 | 18645.2 | 0.0 | 0.0 | 0.0 | 0.0 |
| DEX0488_027.nt.1 | 41955 | 0.0 | 0.0 | 0.0 | 0.0 |
| DEX0488_027.nt.1 | 41956 | 0.0 | 0.0 | 0.0 | 0.0 |
| DEX0488_027.nt.2 | 18645 | 0.0 | 0.0 | 0.0 | 0.0 |
| DEX0488_027.nt.2 | 18645.2 | 0.0 | 0.0 | 0.0 | 0.0 |
| DEX0488_027.nt.3 | 18645 | 0.0 | 0.0 | 0.0 | 0.0 |
| DEX0488_027.nt.3 | 18645.2 | 0.0 | 0.0 | 0.0 | 0.0 |
| DEX0488_027.nt.4 | 18645 | 0.0 | 0.0 | 0.0 | 0.0 |
| DEX0488_027.nt.4 | 18645.2 | 0.0 | 0.0 | 0.0 | 0.0 |
| DEX0488_028.nt.1 | 33088 | 20.0 | 25.0 | 20.0 | 33.3 |
| DEX0488_028.nt.1 | 33088.2 | 20.0 | 25.0 | 20.0 | 33.3 |
| DEX0488_036.nt.1 | 3976 | 0.0 | 0.0 | 0.0 | 0.0 |
| DEX0488_036.nt.1 | 3977 | 0.0 | 0.0 | 0.0 | 0.0 |
| DEX0488_036.nt.2 | 3976 | 0.0 | 0.0 | 0.0 | 0.0 |
| DEX0488_036.nt.2 | 3977 | 0.0 | 0.0 | 0.0 | 0.0 |

[0517] TABLE 22

| | | | Lng | | Lng | | Lng |
|---|---|---|---|---|---|---|---|
| | | Lng | Multi- | Lng | Multi- | Lng | Multi- |
| | | Multi- | cancer | Multi- | cancer | Multi- | cancer |
| | | cancer | ALL | cancer | SQ | cancer | AD |
| | Oligo | ALL % up | % valid | SQ % up | % valid | AD % up | % valid |
| DEX ID | Name | n = 22 | up n = 22 | n = 10 | up n = 10 | n = 12 | up n = 12 |
| DEX0488_001.nt.1 | 79931 | 45.5 | 45.5 | 60.0 | 60.0 | 33.3 | 33.3 |
| DEX0488_001.nt.1 | 79931.1 | 45.5 | 45.5 | 60.0 | 60.0 | 33.3 | 33.3 |
| DEX0488_001.nt.1 | 79932 | 54.5 | 57.1 | 60.0 | 60.0 | 50.0 | 54.5 |
| DEX0488_001.nt.1 | 79932.1 | 50.0 | 50.0 | 60.0 | 60.0 | 41.7 | 41.7 |
| DEX0488_001.nt.10 | 79931 | 45.5 | 45.5 | 60.0 | 60.0 | 33.3 | 33.3 |
| DEX0488_001.nt.10 | 79931.1 | 45.5 | 45.5 | 60.0 | 60.0 | 33.3 | 33.3 |
| DEX0488_001.nt.10 | 79932 | 54.5 | 57.1 | 60.0 | 60.0 | 50.0 | 54.5 |
| DEX0488_001.nt.10 | 79932.1 | 50.0 | 50.0 | 60.0 | 60.0 | 41.7 | 41.7 |
| DEX0488_001.nt.11 | 79931 | 45.5 | 45.5 | 60.0 | 60.0 | 33.3 | 33.3 |
| DEX0488_001.nt.11 | 79931.1 | 45.5 | 45.5 | 60.0 | 60.0 | 33.3 | 33.3 |
| DEX0488_001.nt.11 | 79932 | 54.5 | 57.1 | 60.0 | 60.0 | 50.0 | 54.5 |
| DEX0488_001.nt.11 | 79932.1 | 50.0 | 50.0 | 60.0 | 60.0 | 41.7 | 41.7 |
| DEX0488_001.nt.2 | 79931 | 45.5 | 45.5 | 60.0 | 60.0 | 33.3 | 33.3 |
| DEX0488_001.nt.2 | 79931.1 | 45.5 | 45.5 | 60.0 | 60.0 | 33.3 | 33.3 |
| DEX0488_001.nt.2 | 79932 | 54.5 | 57.1 | 60.0 | 60.0 | 50.0 | 54.5 |
| DEX0488_001.nt.2 | 79932.1 | 50.0 | 50.0 | 60.0 | 60.0 | 41.7 | 41.7 |
| DEX0488_001.nt.3 | 79931 | 45.5 | 45.5 | 60.0 | 60.0 | 33.3 | 33.3 |
| DEX0488_001.nt.3 | 79931.1 | 45.5 | 45.5 | 60.0 | 60.0 | 33.3 | 33.3 |
| DEX0488_001.nt.3 | 79932 | 54.5 | 57.1 | 60.0 | 60.0 | 50.0 | 54.5 |
| DEX0488_001.nt.3 | 79932.1 | 50.0 | 50.0 | 60.0 | 60.0 | 41.7 | 41.7 |
| DEX0488_001.nt.4 | 79931 | 45.5 | 45.5 | 60.0 | 60.0 | 33.3 | 33.3 |
| DEX0488_001.nt.4 | 79931.1 | 45.5 | 45.5 | 60.0 | 60.0 | 33.3 | 33.3 |
| DEX0488_001.nt.4 | 79932 | 54.5 | 57.1 | 60.0 | 60.0 | 50.0 | 54.5 |
| DEX0488_001.nt.4 | 79932.1 | 50.0 | 50.0 | 60.0 | 60.0 | 41.7 | 41.7 |
| DEX0488_001.nt.5 | 79931 | 45.5 | 45.5 | 60.0 | 60.0 | 33.3 | 33.3 |
| DEX0488_001.nt.5 | 79931.1 | 45.5 | 45.5 | 60.0 | 60.0 | 33.3 | 33.3 |
| DEX0488_001.nt.5 | 79932 | 54.5 | 57.1 | 60.0 | 60.0 | 50.0 | 54.5 |
| DEX0488_001.nt.5 | 79932.1 | 50.0 | 50.0 | 60.0 | 60.0 | 41.7 | 41.7 |
| DEX0488_001.nt.6 | 79931 | 45.5 | 45.5 | 60.0 | 60.0 | 33.3 | 33.3 |
| DEX0488_001.nt.6 | 79931.1 | 45.5 | 45.5 | 60.0 | 60.0 | 33.3 | 33.3 |
| DEX0488_001.nt.6 | 79932 | 54.5 | 57.1 | 60.0 | 60.0 | 50.0 | 54.5 |
| DEX0488_001.nt.6 | 79932.1 | 50.0 | 50.0 | 60.0 | 60.0 | 41.7 | 41.7 |
| DEX0488_001.nt.7 | 79931 | 45.5 | 45.5 | 60.0 | 60.0 | 33.3 | 33.3 |
| DEX0488_001.nt.7 | 79931.1 | 45.5 | 45.5 | 60.0 | 60.0 | 33.3 | 33.3 |
| DEX0488_001.nt.7 | 79932 | 54.5 | 57.1 | 60.0 | 60.0 | 50.0 | 54.5 |
| DEX0488_001.nt.7 | 79932.1 | 50.0 | 50.0 | 60.0 | 60.0 | 41.7 | 41.7 |
| DEX0488_001.nt.8 | 79931 | 45.5 | 45.5 | 60.0 | 60.0 | 33.3 | 33.3 |
| DEX0488_001.nt.8 | 79931.1 | 45.5 | 45.5 | 60.0 | 60.0 | 33.3 | 33.3 |
| DEX0488_001.nt.8 | 79932 | 54.5 | 57.1 | 60.0 | 60.0 | 50.0 | 54.5 |
| DEX0488_001.nt.8 | 79932.1 | 50.0 | 50.0 | 60.0 | 60.0 | 41.7 | 41.7 |
| DEX0488_001.nt.9 | 79931 | 45.5 | 45.5 | 60.0 | 60.0 | 33.3 | 33.3 |
| DEX0488_001.nt.9 | 79931.1 | 45.5 | 45.5 | 60.0 | 60.0 | 33.3 | 33.3 |
| DEX0488_001.nt.9 | 79932 | 54.5 | 57.1 | 60.0 | 60.0 | 50.0 | 54.5 |
| DEX0488_001.nt.9 | 79932.1 | 50.0 | 50.0 | 60.0 | 60.0 | 41.7 | 41.7 |
| DEX0488_002.nt.1 | 91111 | 0.0 | 0.0 | 0.0 | 0.0 | 0.0 | 0.0 |
| DEX0488_002.nt.1 | 91111.1 | 0.0 | 0.0 | 0.0 | 0.0 | 0.0 | 0.0 |
| DEX0488_002.nt.1 | 91112 | 0.0 | 0.0 | 0.0 | 0.0 | 0.0 | 0.0 |
| DEX0488_002.nt.1 | 91112.1 | 0.0 | 0.0 | 0.0 | 0.0 | 0.0 | 0.0 |
| DEX0488_003.nt.1 | 27921 | 4.5 | 4.5 | 0.0 | 0.0 | 8.3 | 8.3 |
| DEX0488_003.nt.1 | 27921.1 | 4.5 | 4.5 | 0.0 | 0.0 | 8.3 | 8.3 |
| DEX0488_003.nt.1 | 27922 | 4.5 | 4.5 | 0.0 | 0.0 | 8.3 | 8.3 |
| DEX0488_003.nt.1 | 27922.1 | 0.0 | 0.0 | 0.0 | 0.0 | 0.0 | 0.0 |
| DEX0488_003.nt.1 | 78855 | 18.2 | 18.2 | 20.0 | 20.0 | 16.7 | 16.7 |
| DEX0488_003.nt.1 | 78855.1 | 4.5 | 4.8 | 0.0 | 0.0 | 8.3 | 9.1 |
| DEX0488_003.nt.1 | 78856 | 9.1 | 9.1 | 0.0 | 0.0 | 16.7 | 16.7 |
| DEX0488_003.nt.1 | 78856.1 | 13.6 | 13.6 | 10.0 | 10.0 | 16.7 | 16.7 |
| DEX0488_003.nt.2 | 27921 | 4.5 | 4.5 | 0.0 | 0.0 | 8.3 | 8.3 |
| DEX0488_003.nt.2 | 27921.1 | 4.5 | 4.5 | 0.0 | 0.0 | 8.3 | 8.3 |
| DEX0488_003.nt.2 | 27922 | 4.5 | 4.5 | 0.0 | 0.0 | 8.3 | 8.3 |
| DEX0488_003.nt.2 | 27922.1 | 0.0 | 0.0 | 0.0 | 0.0 | 0.0 | 0.0 |
| DEX0488_003.nt.2 | 78855 | 18.2 | 18.2 | 20.0 | 20.0 | 16.7 | 16.7 |
| DEX0488_003.nt.2 | 78855.1 | 4.5 | 4.8 | 0.0 | 0.0 | 8.3 | 9.1 |
| DEX0488_003.nt.2 | 78856 | 9.1 | 9.1 | 0.0 | 0.0 | 16.7 | 16.7 |
| DEX0488_003.nt.2 | 78856.1 | 13.6 | 13.6 | 10.0 | 10.0 | 16.7 | 16.7 |
| DEX0488_003.nt.3 | 27921 | 4.5 | 4.5 | 0.0 | 0.0 | 8.3 | 8.3 |
| DEX0488_003.nt.3 | 27921.1 | 4.5 | 4.5 | 0.0 | 0.0 | 8.3 | 8.3 |
| DEX0488_003.nt.3 | 27922 | 4.5 | 4.5 | 0.0 | 0.0 | 8.3 | 8.3 |
| DEX0488_003.nt.3 | 27922.1 | 0.0 | 0.0 | 0.0 | 0.0 | 0.0 | 0.0 |
| DEX0488_003.nt.3 | 78855 | 18.2 | 18.2 | 20.0 | 20.0 | 16.7 | 16.7 |
| DEX0488_003.nt.3 | 78855.1 | 4.5 | 4.8 | 0.0 | 0.0 | 8.3 | 9.1 |
| DEX0488_003.nt.3 | 78856 | 9.1 | 9.1 | 0.0 | 0.0 | 16.7 | 16.7 |
| DEX0488_003.nt.3 | 78856.1 | 13.6 | 13.6 | 10.0 | 10.0 | 16.7 | 16.7 |
| DEX0488_003.nt.4 | 27921 | 4.5 | 4.5 | 0.0 | 0.0 | 8.3 | 8.3 |
| DEX0488_003.nt.4 | 27921.1 | 4.5 | 4.5 | 0.0 | 0.0 | 8.3 | 8.3 |
| DEX0488_003.nt.4 | 27922 | 4.5 | 4.5 | 0.0 | 0.0 | 8.3 | 8.3 |
| DEX0488_003.nt.4 | 27922.1 | 0.0 | 0.0 | 0.0 | 0.0 | 0.0 | 0.0 |
| DEX0488_003.nt.4 | 78855 | 18.2 | 18.2 | 20.0 | 20.0 | 16.7 | 16.7 |
| DEX0488_003.nt.4 | 78855.1 | 4.5 | 4.8 | 0.0 | 0.0 | 8.3 | 9.1 |
| DEX0488_003.nt.4 | 78856 | 9.1 | 9.1 | 0.0 | 0.0 | 16.7 | 16.7 |
| DEX0488_003.nt.4 | 78856.1 | 13.6 | 13.6 | 10.0 | 10.0 | 16.7 | 16.7 |
| DEX0488_003.nt.5 | 27921 | 4.5 | 4.5 | 0.0 | 0.0 | 8.3 | 8.3 |
| DEX0488_003.nt.5 | 27921.1 | 4.5 | 4.5 | 0.0 | 0.0 | 8.3 | 8.3 |
| DEX0488_003.nt.5 | 27922 | 4.5 | 4.5 | 0.0 | 0.0 | 8.3 | 8.3 |
| DEX0488_003.nt.5 | 27922.1 | 0.0 | 0.0 | 0.0 | 0.0 | 0.0 | 0.0 |
| DEX0488_003.nt.5 | 78855 | 18.2 | 18.2 | 20.0 | 20.0 | 16.7 | 16.7 |
| DEX0488_003.nt.5 | 78855.1 | 4.5 | 4.8 | 0.0 | 0.0 | 8.3 | 9.1 |
| DEX0488_003.nt.5 | 78856 | 9.1 | 9.1 | 0.0 | 0.0 | 16.7 | 16.7 |
| DEX0488_003.nt.5 | 78856.1 | 13.6 | 13.6 | 10.0 | 10.0 | 16.7 | 16.7 |
| DEX0488_003.nt.6 | 27921 | 4.5 | 4.5 | 0.0 | 0.0 | 8.3 | 8.3 |
| DEX0488_003.nt.6 | 27921.1 | 4.5 | 4.5 | 0.0 | 0.0 | 8.3 | 8.3 |
| DEX0488_003.nt.6 | 27922 | 4.5 | 4.5 | 0.0 | 0.0 | 8.3 | 8.3 |
| DEX0488_003.nt.6 | 27922.1 | 0.0 | 0.0 | 0.0 | 0.0 | 0.0 | 0.0 |
| DEX0488_003.nt.6 | 78855 | 18.2 | 18.2 | 20.0 | 20.0 | 16.7 | 16.7 |
| DEX0488_003.nt.6 | 78855.1 | 4.5 | 4.8 | 0.0 | 0.0 | 8.3 | 9.1 |
| DEX0488_003.nt.6 | 78856 | 9.1 | 9.1 | 0.0 | 0.0 | 16.7 | 16.7 |
| DEX0488_003.nt.6 | 78856.1 | 13.6 | 13.6 | 10.0 | 10.0 | 16.7 | 16.7 |
| DEX0488_003.nt.7 | 78855 | 18.2 | 18.2 | 20.0 | 20.0 | 16.7 | 16.7 |
| DEX0488_003.nt.7 | 78855.1 | 4.5 | 4.8 | 0.0 | 0.0 | 8.3 | 9.1 |
| DEX0488_003.nt.7 | 78856 | 9.1 | 9.1 | 0.0 | 0.0 | 16.7 | 16.7 |
| DEX0488_003.nt.7 | 78856.1 | 13.6 | 13.6 | 10.0 | 10.0 | 16.7 | 16.7 |
| DEX0488_004.nt.1 | 10666 | 4.5 | 5.3 | 0.0 | 0.0 | 8.3 | 8.3 |
| DEX0488_004.nt.1 | 10666.1 | 4.5 | 5.0 | 0.0 | 0.0 | 8.3 | 8.3 |
| DEX0488_004.nt.1 | 10667 | 4.5 | 12.5 | 0.0 | 0.0 | 8.3 | 16.7 |
| DEX0488_004.nt.1 | 10667.1 | 4.5 | 8.3 | 0.0 | 0.0 | 8.3 | 11.1 |
| DEX0488_005.nt.1 | 9744 | 9.1 | 9.1 | 10.0 | 10.0 | 8.3 | 8.3 |
| DEX0488_005.nt.1 | 9744.1 | 9.1 | 9.1 | 10.0 | 10.0 | 8.3 | 8.3 |
| DEX0488_005.nt.1 | 9745 | 13.6 | 13.6 | 20.0 | 20.0 | 8.3 | 8.3 |
| DEX0488_005.nt.1 | 9745.1 | 9.1 | 9.1 | 10.0 | 10.0 | 8.3 | 8.3 |
| DEX0488_006.nt.1 | 4353 | 9.1 | 66.7 | 10.0 | 100.0 | 8.3 | 50.0 |
| DEX0488_006.nt.1 | 4353.1 | 4.5 | 33.3 | 10.0 | 100.0 | 0.0 | 0.0 |
| DEX0488_006.nt.1 | 5804 | 4.5 | 50.0 | 10.0 | 100.0 | 0.0 | 0.0 |
| DEX0488_006.nt.1 | 5804.1 | 4.5 | 33.3 | 10.0 | 100.0 | 0.0 | 0.0 |
| DEX0488_006.nt.1 | 5804.2 | 4.5 | 33.3 | 10.0 | 100.0 | 0.0 | 0.0 |
| DEX0488_006.nt.1 | 92287 | 22.7 | 55.6 | 20.0 | 100.0 | 25.0 | 42.9 |
| DEX0488_006.nt.1 | 92287.1 | 18.2 | 50.0 | 10.0 | 100.0 | 25.0 | 42.9 |
| DEX0488_007.nt.1 | 41955 | 9.1 | 11.1 | 10.0 | 14.3 | 8.3 | 9.1 |
| DEX0488_007.nt.1 | 41955.1 | 9.1 | 9.1 | 10.0 | 10.0 | 8.3 | 8.3 |
| DEX0488_007.nt.1 | 41955.2 | 9.1 | 11.8 | 10.0 | 12.5 | 8.3 | 11.1 |
| DEX0488_007.nt.1 | 41955.3 | 9.1 | 9.1 | 10.0 | 10.0 | 8.3 | 8.3 |
| DEX0488_007.nt.1 | 41955.4 | 9.1 | 9.1 | 10.0 | 10.0 | 8.3 | 8.3 |
| DEX0488_007.nt.1 | 41956 | 9.1 | 9.5 | 10.0 | 11.1 | 8.3 | 8.3 |
| DEX0488_007.nt.1 | 41956.1 | 9.1 | 12.5 | 10.0 | 12.5 | 8.3 | 12.5 |
| DEX0488_007.nt.1 | 41956.2 | 9.1 | 9.1 | 10.0 | 10.0 | 8.3 | 8.3 |
| DEX0488_007.nt.1 | 41956.3 | 9.1 | 9.5 | 10.0 | 11.1 | 8.3 | 8.3 |
| DEX0488_007.nt.1 | 41956.4 | 9.1 | 9.1 | 10.0 | 10.0 | 8.3 | 8.3 |
| DEX0488_008.nt.1 | 17292 | 13.6 | 13.6 | 0.0 | 0.0 | 25.0 | 25.0 |
| DEX0488_008.nt.1 | 17292.1 | 13.6 | 13.6 | 0.0 | 0.0 | 25.0 | 25.0 |
| DEX0488_008.nt.1 | 17293 | 13.6 | 13.6 | 0.0 | 0.0 | 25.0 | 25.0 |
| DEX0488_008.nt.1 | 17293.1 | 4.5 | 5.9 | 0.0 | 0.0 | 8.3 | 12.5 |
| DEX0488_008.nt.1 | 2085 | 9.1 | 9.5 | 0.0 | 0.0 | 16.7 | 18.2 |
| DEX0488_008.nt.1 | 24404 | 13.6 | 14.3 | 0.0 | 0.0 | 25.0 | 25.0 |
| DEX0488_008.nt.1 | 24404.1 | 13.6 | 13.6 | 0.0 | 0.0 | 25.0 | 25.0 |
| DEX0488_008.nt.1 | 24405 | 13.6 | 13.6 | 0.0 | 0.0 | 25.0 | 25.0 |
| DEX0488_008.nt.1 | 24405.1 | 13.6 | 13.6 | 0.0 | 0.0 | 25.0 | 25.0 |
| DEX0488_008.nt.1 | 4909 | 13.6 | 13.6 | 0.0 | 0.0 | 25.0 | 25.0 |
| DEX0488_008.nt.1 | 4909.1 | 13.6 | 13.6 | 0.0 | 0.0 | 25.0 | 25.0 |
| DEX0488_008.nt.1 | 4910 | 13.6 | 13.6 | 0.0 | 0.0 | 25.0 | 25.0 |
| DEX0488_008.nt.1 | 4910.1 | 13.6 | 13.6 | 0.0 | 0.0 | 25.0 | 25.0 |
| DEX0488_008.nt.2 | 17292 | 13.6 | 13.6 | 0.0 | 0.0 | 25.0 | 25.0 |
| DEX0488_008.nt.2 | 17292.1 | 13.6 | 13.6 | 0.0 | 0.0 | 25.0 | 25.0 |
| DEX0488_008.nt.2 | 17293 | 13.6 | 13.6 | 0.0 | 0.0 | 25.0 | 25.0 |
| DEX0488_008.nt.2 | 17293.1 | 4.5 | 5.9 | 0.0 | 0.0 | 8.3 | 12.5 |
| DEX0488_008.nt.2 | 2085 | 9.1 | 9.5 | 0.0 | 0.0 | 16.7 | 18.2 |
| DEX0488_008.nt.2 | 24404 | 13.6 | 14.3 | 0.0 | 0.0 | 25.0 | 25.0 |
| DEX0488_008.nt.2 | 24404.1 | 13.6 | 13.6 | 0.0 | 0.0 | 25.0 | 25.0 |
| DEX0488_008.nt.2 | 24405 | 13.6 | 13.6 | 0.0 | 0.0 | 25.0 | 25.0 |
| DEX0488_008.nt.2 | 24405.1 | 13.6 | 13.6 | 0.0 | 0.0 | 25.0 | 25.0 |
| DEX0488_008.nt.2 | 4909 | 13.6 | 13.6 | 0.0 | 0.0 | 25.0 | 25.0 |
| DEX0488_008.nt.2 | 4909.1 | 13.6 | 13.6 | 0.0 | 0.0 | 25.0 | 25.0 |
| DEX0488_008.nt.2 | 4910 | 13.6 | 13.6 | 0.0 | 0.0 | 25.0 | 25.0 |
| DEX0488_008.nt.2 | 4910.1 | 13.6 | 13.6 | 0.0 | 0.0 | 25.0 | 25.0 |
| DEX0488_009.nt.1 | 79339 | 50.0 | 50.0 | 60.0 | 60.0 | 41.7 | 41.7 |
| DEX0488_009.nt.1 | 79339.1 | 45.5 | 45.5 | 60.0 | 60.0 | 33.3 | 33.3 |
| DEX0488_010.nt.1 | 26770 | 22.7 | 22.7 | 10.0 | 10.0 | 33.3 | 33.3 |
| DEX0488_010.nt.1 | 26770.1 | 22.7 | 22.7 | 10.0 | 10.0 | 33.3 | 33.3 |
| DEX0488_011.nt.1 | 33840 | 72.7 | 72.7 | 100.0 | 100.0 | 50.0 | 50.0 |
| DEX0488_011.nt.1 | 33840.1 | 68.2 | 68.2 | 90.0 | 90.0 | 50.0 | 50.0 |
| DEX0488_011.nt.1 | 33841 | 63.6 | 63.6 | 80.0 | 80.0 | 50.0 | 50.0 |
| DEX0488_011.nt.1 | 33841.1 | 63.6 | 63.6 | 80.0 | 80.0 | 50.0 | 50.0 |
| DEX0488_011.nt.1 | 39927 | 63.6 | 66.7 | 80.0 | 80.0 | 50.0 | 54.5 |
| DEX0488_011.nt.1 | 39927.1 | 68.2 | 68.2 | 90.0 | 90.0 | 50.0 | 50.0 |
| DEX0488_011.nt.1 | 39927.2 | 68.2 | 68.2 | 90.0 | 90.0 | 50.0 | 50.0 |
| DEX0488_011.nt.1 | 39927.3 | 63.6 | 63.6 | 80.0 | 80.0 | 50.0 | 50.0 |
| DEX0488_011.nt.1 | 39927.4 | 68.2 | 68.2 | 90.0 | 90.0 | 50.0 | 50.0 |
| DEX0488_011.nt.1 | 39928 | 63.6 | 63.6 | 80.0 | 80.0 | 50.0 | 50.0 |
| DEX0488_011.nt.1 | 39928.1 | 63.6 | 66.7 | 80.0 | 80.0 | 50.0 | 54.5 |
| DEX0488_011.nt.1 | 39928.2 | 59.1 | 61.9 | 70.0 | 77.8 | 50.0 | 50.0 |
| DEX0488_011.nt.1 | 39928.3 | 63.6 | 66.7 | 80.0 | 80.0 | 50.0 | 54.5 |
| DEX0488_011.nt.1 | 39928.4 | 63.6 | 63.6 | 80.0 | 80.0 | 50.0 | 50.0 |
| DEX0488_012.nt.1 | 21187 | 13.6 | 13.6 | 10.0 | 10.0 | 16.7 | 16.7 |
| DEX0488_012.nt.1 | 21187.1 | 9.1 | 9.1 | 10.0 | 10.0 | 8.3 | 8.3 |
| DEX0488_012.nt.1 | 21188 | 18.2 | 19.0 | 20.0 | 20.0 | 16.7 | 18.2 |
| DEX0488_012.nt.1 | 21188.1 | 18.2 | 18.2 | 20.0 | 20.0 | 16.7 | 16.7 |
| DEX0488_012.nt.1 | 78927 | 18.2 | 18.2 | 20.0 | 20.0 | 16.7 | 16.7 |
| DEX0488_012.nt.1 | 78927.1 | 18.2 | 18.2 | 20.0 | 20.0 | 16.7 | 16.7 |
| DEX0488_013.nt.1 | 79955 | 22.7 | 22.7 | 30.0 | 30.0 | 16.7 | 16.7 |
| DEX0488_013.nt.1 | 79955.1 | 31.8 | 33.3 | 40.0 | 40.0 | 25.0 | 27.3 |
| DEX0488_013.nt.1 | 79956 | 36.4 | 36.4 | 50.0 | 50.0 | 25.0 | 25.0 |
| DEX0488_013.nt.1 | 79956.1 | 31.8 | 33.3 | 40.0 | 44.4 | 25.0 | 25.0 |
| DEX0488_013.nt.1 | 79959 | 31.8 | 33.3 | 40.0 | 44.4 | 25.0 | 25.0 |
| DEX0488_013.nt.1 | 79959.1 | 31.8 | 35.0 | 40.0 | 44.4 | 25.0 | 27.3 |
| DEX0488_013.nt.1 | 79960 | 40.9 | 40.9 | 50.0 | 50.0 | 33.3 | 33.3 |
| DEX0488_013.nt.1 | 79960.1 | 50.0 | 52.4 | 70.0 | 70.0 | 33.3 | 36.4 |
| DEX0488_013.nt.1 | 79963 | 36.4 | 36.4 | 50.0 | 50.0 | 25.0 | 25.0 |
| DEX0488_013.nt.1 | 79963.1 | 36.4 | 38.1 | 50.0 | 55.6 | 25.0 | 25.0 |
| DEX0488_013.nt.1 | 79964 | 22.7 | 23.8 | 40.0 | 44.4 | 8.3 | 8.3 |
| DEX0488_013.nt.1 | 79964.1 | 36.4 | 38.1 | 40.0 | 40.0 | 33.3 | 36.4 |
| DEX0488_013.nt.2 | 79959 | 31.8 | 33.3 | 40.0 | 44.4 | 25.0 | 25.0 |
| DEX0488_013.nt.2 | 79959.1 | 31.8 | 35.0 | 40.0 | 44.4 | 25.0 | 27.3 |
| DEX0488_013.nt.2 | 79960 | 40.9 | 40.9 | 50.0 | 50.0 | 33.3 | 33.3 |
| DEX0488_013.nt.2 | 79960.1 | 50.0 | 52.4 | 70.0 | 70.0 | 33.3 | 36.4 |
| DEX0488_014.nt.1 | 90171 | 0.0 | 0.0 | 0.0 | 0.0 | 0.0 | 0.0 |
| DEX0488_014.nt.1 | 90171.1 | 0.0 | 0.0 | 0.0 | 0.0 | 0.0 | 0.0 |
| DEX0488_014.nt.1 | 90172 | 0.0 | 0.0 | 0.0 | 0.0 | 0.0 | 0.0 |
| DEX0488_014.nt.1 | 90172.1 | 0.0 | 0.0 | 0.0 | 0.0 | 0.0 | 0.0 |
| DEX0488_014.nt.2 | 90171 | 0.0 | 0.0 | 0.0 | 0.0 | 0.0 | 0.0 |
| DEX0488_014.nt.2 | 90171.1 | 0.0 | 0.0 | 0.0 | 0.0 | 0.0 | 0.0 |
| DEX0488_014.nt.2 | 90172 | 0.0 | 0.0 | 0.0 | 0.0 | 0.0 | 0.0 |
| DEX0488_014.nt.2 | 90172.1 | 0.0 | 0.0 | 0.0 | 0.0 | 0.0 | 0.0 |
| DEX0488_014.nt.3 | 90171 | 0.0 | 0.0 | 0.0 | 0.0 | 0.0 | 0.0 |
| DEX0488_014.nt.3 | 90171.1 | 0.0 | 0.0 | 0.0 | 0.0 | 0.0 | 0.0 |
| DEX0488_014.nt.3 | 90172 | 0.0 | 0.0 | 0.0 | 0.0 | 0.0 | 0.0 |
| DEX0488_014.nt.3 | 90172.1 | 0.0 | 0.0 | 0.0 | 0.0 | 0.0 | 0.0 |
| DEX0488_014.nt.4 | 90171 | 0.0 | 0.0 | 0.0 | 0.0 | 0.0 | 0.0 |
| DEX0488_014.nt.4 | 90171.1 | 0.0 | 0.0 | 0.0 | 0.0 | 0.0 | 0.0 |
| DEX0488_014.nt.4 | 90172 | 0.0 | 0.0 | 0.0 | 0.0 | 0.0 | 0.0 |
| DEX0488_014.nt.4 | 90172.1 | 0.0 | 0.0 | 0.0 | 0.0 | 0.0 | 0.0 |
| DEX0488_015.nt.1 | 78631 | 4.5 | 5.9 | 0.0 | 0.0 | 8.3 | 10.0 |
| DEX0488_015.nt.1 | 78631.1 | 9.1 | 10.5 | 0.0 | 0.0 | 16.7 | 18.2 |
| DEX0488_015.nt.1 | 78632 | 0.0 | 0.0 | 0.0 | 0.0 | 0.0 | 0.0 |
| DEX0488_015.nt.1 | 78632.1 | 0.0 | 0.0 | 0.0 | 0.0 | 0.0 | 0.0 |
| DEX0488_015.nt.2 | 78631 | 4.5 | 5.9 | 0.0 | 0.0 | 8.3 | 10.0 |
| DEX0488_015.nt.2 | 78631.1 | 9.1 | 10.5 | 0.0 | 0.0 | 16.7 | 18.2 |
| DEX0488_015.nt.2 | 78632 | 0.0 | 0.0 | 0.0 | 0.0 | 0.0 | 0.0 |
| DEX0488_015.nt.2 | 78632.1 | 0.0 | 0.0 | 0.0 | 0.0 | 0.0 | 0.0 |
| DEX0488_016.nt.1 | 79660 | 40.9 | 47.4 | 30.0 | 42.9 | 50.0 | 50.0 |
| DEX0488_016.nt.1 | 79660.1 | 36.4 | 40.0 | 20.0 | 25.0 | 50.0 | 50.0 |
| DEX0488_016.nt.10 | 79659 | 13.6 | 42.9 | 0.0 | 0.0 | 25.0 | 42.9 |
| DEX0488_016.nt.10 | 79659.1 | 22.7 | 45.5 | 0.0 | 0.0 | 41.7 | 55.6 |
| DEX0488_016.nt.10 | 79660 | 40.9 | 47.4 | 30.0 | 42.9 | 50.0 | 50.0 |
| DEX0488_016.nt.10 | 79660.1 | 36.4 | 40.0 | 20.0 | 25.0 | 50.0 | 50.0 |
| DEX0488_016.nt.11 | 79659 | 13.6 | 42.9 | 0.0 | 0.0 | 25.0 | 42.9 |
| DEX0488_016.nt.11 | 79659.1 | 22.7 | 45.5 | 0.0 | 0.0 | 41.7 | 55.6 |
| DEX0488_016.nt.11 | 79660 | 40.9 | 47.4 | 30.0 | 42.9 | 50.0 | 50.0 |
| DEX0488_016.nt.11 | 79660.1 | 36.4 | 40.0 | 20.0 | 25.0 | 50.0 | 50.0 |
| DEX0488_016.nt.2 | 79660 | 40.9 | 47.4 | 30.0 | 42.9 | 50.0 | 50.0 |
| DEX0488_016.nt.2 | 79660.1 | 36.4 | 40.0 | 20.0 | 25.0 | 50.0 | 50.0 |
| DEX0488_016.nt.3 | 79660 | 40.9 | 47.4 | 30.0 | 42.9 | 50.0 | 50.0 |
| DEX0488_016.nt.3 | 79660.1 | 36.4 | 40.0 | 20.0 | 25.0 | 50.0 | 50.0 |
| DEX0488_016.nt.4 | 79660 | 40.9 | 47.4 | 30.0 | 42.9 | 50.0 | 50.0 |
| DEX0488_016.nt.4 | 79660.1 | 36.4 | 40.0 | 20.0 | 25.0 | 50.0 | 50.0 |
| DEX0488_016.nt.5 | 79660 | 40.9 | 47.4 | 30.0 | 42.9 | 50.0 | 50.0 |
| DEX0488_016.nt.5 | 79660.1 | 36.4 | 40.0 | 20.0 | 25.0 | 50.0 | 50.0 |
| DEX0488_016.nt.6 | 79660 | 40.9 | 47.4 | 30.0 | 42.9 | 50.0 | 50.0 |
| DEX0488_016.nt.6 | 79660.1 | 36.4 | 40.0 | 20.0 | 25.0 | 50.0 | 50.0 |
| DEX0488_016.nt.7 | 79660 | 40.9 | 47.4 | 30.0 | 42.9 | 50.0 | 50.0 |
| DEX0488_016.nt.7 | 79660.1 | 36.4 | 40.0 | 20.0 | 25.0 | 50.0 | 50.0 |
| DEX0488_016.nt.8 | 79660 | 40.9 | 47.4 | 30.0 | 42.9 | 50.0 | 50.0 |
| DEX0488_016.nt.8 | 79660.1 | 36.4 | 40.0 | 20.0 | 25.0 | 50.0 | 50.0 |
| DEX0488_016.nt.9 | 79660 | 40.9 | 47.4 | 30.0 | 42.9 | 50.0 | 50.0 |
| DEX0488_016.nt.9 | 79660.1 | 36.4 | 40.0 | 20.0 | 25.0 | 50.0 | 50.0 |
| DEX0488_017.nt.1 | 4353 | 9.1 | 66.7 | 10.0 | 100.0 | 8.3 | 50.0 |
| DEX0488_017.nt.1 | 4353.1 | 4.5 | 33.3 | 10.0 | 100.0 | 0.0 | 0.0 |
| DEX0488_017.nt.1 | 5804 | 4.5 | 50.0 | 10.0 | 100.0 | 0.0 | 0.0 |
| DEX0488_017.nt.1 | 5804.1 | 4.5 | 33.3 | 10.0 | 100.0 | 0.0 | 0.0 |
| DEX0488_017.nt.1 | 5804.2 | 4.5 | 33.3 | 10.0 | 100.0 | 0.0 | 0.0 |
| DEX0488_017.nt.1 | 92287 | 22.7 | 55.6 | 20.0 | 100.0 | 25.0 | 42.9 |
| DEX0488_017.nt.1 | 92287.1 | 18.2 | 50.0 | 10.0 | 100.0 | 25.0 | 42.9 |
| DEX0488_018.nt.1 | 79936 | 68.2 | 68.2 | 90.0 | 90.0 | 50.0 | 50.0 |
| DEX0488_018.nt.1 | 79936.1 | 68.2 | 68.2 | 70.0 | 70.0 | 66.7 | 66.7 |
| DEX0488_018.nt.1 | 79944 | 68.2 | 68.2 | 80.0 | 80.0 | 58.3 | 58.3 |
| DEX0488_018.nt.1 | 79944.1 | 72.7 | 76.2 | 90.0 | 90.0 | 58.3 | 63.6 |
| DEX0488_018.nt.2 | 79936 | 68.2 | 68.2 | 90.0 | 90.0 | 50.0 | 50.0 |
| DEX0488_018.nt.2 | 79936.1 | 68.2 | 68.2 | 70.0 | 70.0 | 66.7 | 66.7 |
| DEX0488_018.nt.2 | 79944 | 68.2 | 68.2 | 80.0 | 80.0 | 58.3 | 58.3 |
| DEX0488_018.nt.2 | 79944.1 | 72.7 | 76.2 | 90.0 | 90.0 | 58.3 | 63.6 |
| DEX0488_018.nt.3 | 79936 | 68.2 | 68.2 | 90.0 | 90.0 | 50.0 | 50.0 |
| DEX0488_018.nt.3 | 79936.1 | 68.2 | 68.2 | 70.0 | 70.0 | 66.7 | 66.7 |
| DEX0488_018.nt.3 | 79944 | 68.2 | 68.2 | 80.0 | 80.0 | 58.3 | 58.3 |
| DEX0488_018.nt.3 | 79944.1 | 72.7 | 76.2 | 90.0 | 90.0 | 58.3 | 63.6 |
| DEX0488_018.nt.4 | 79936 | 68.2 | 68.2 | 90.0 | 90.0 | 50.0 | 50.0 |
| DEX0488_018.nt.4 | 79936.1 | 68.2 | 68.2 | 70.0 | 70.0 | 66.7 | 66.7 |
| DEX0488_018.nt.4 | 79944 | 68.2 | 68.2 | 80.0 | 80.0 | 58.3 | 58.3 |
| DEX0488_018.nt.4 | 79944.1 | 72.7 | 76.2 | 90.0 | 90.0 | 58.3 | 63.6 |
| DEX0488_018.nt.5 | 79936 | 68.2 | 68.2 | 90.0 | 90.0 | 50.0 | 50.0 |
| DEX0488_018.nt.5 | 79936.1 | 68.2 | 68.2 | 70.0 | 70.0 | 66.7 | 66.7 |
| DEX0488_018.nt.5 | 79944 | 68.2 | 68.2 | 80.0 | 80.0 | 58.3 | 58.3 |
| DEX0488_018.nt.5 | 79944.1 | 72.7 | 76.2 | 90.0 | 90.0 | 58.3 | 63.6 |
| DEX0488_018.nt.6 | 79936 | 68.2 | 68.2 | 90.0 | 90.0 | 50.0 | 50.0 |
| DEX0488_018.nt.6 | 79936.1 | 68.2 | 68.2 | 70.0 | 70.0 | 66.7 | 66.7 |
| DEX0488_018.nt.6 | 79944 | 68.2 | 68.2 | 80.0 | 80.0 | 58.3 | 58.3 |
| DEX0488_018.nt.6 | 79944.1 | 72.7 | 76.2 | 90.0 | 90.0 | 58.3 | 63.6 |
| DEX0488_018.nt.7 | 79936 | 68.2 | 68.2 | 90.0 | 90.0 | 50.0 | 50.0 |
| DEX0488_018.nt.7 | 79936.1 | 68.2 | 68.2 | 70.0 | 70.0 | 66.7 | 66.7 |
| DEX0488_018.nt.7 | 79944 | 68.2 | 68.2 | 80.0 | 80.0 | 58.3 | 58.3 |
| DEX0488_018.nt.7 | 79944.1 | 72.7 | 76.2 | 90.0 | 90.0 | 58.3 | 63.6 |
| DEX0488_018.nt.8 | 79936 | 68.2 | 68.2 | 90.0 | 90.0 | 50.0 | 50.0 |
| DEX0488_018.nt.8 | 79936.1 | 68.2 | 68.2 | 70.0 | 70.0 | 66.7 | 66.7 |
| DEX0488_018.nt.8 | 79944 | 68.2 | 68.2 | 80.0 | 80.0 | 58.3 | 58.3 |
| DEX0488_018.nt.8 | 79944.1 | 72.7 | 76.2 | 90.0 | 90.0 | 58.3 | 63.6 |
| DEX0488_019.nt.1 | 79955 | 22.7 | 22.7 | 30.0 | 30.0 | 16.7 | 16.7 |
| DEX0488_019.nt.1 | 79955.1 | 31.8 | 33.3 | 40.0 | 40.0 | 25.0 | 27.3 |
| DEX0488_019.nt.1 | 79956 | 36.4 | 36.4 | 50.0 | 50.0 | 25.0 | 25.0 |
| DEX0488_019.nt.1 | 79956.1 | 31.8 | 33.3 | 40.0 | 44.4 | 25.0 | 25.0 |
| DEX0488_019.nt.1 | 79959 | 31.8 | 33.3 | 40.0 | 44.4 | 25.0 | 25.0 |
| DEX0488_019.nt.1 | 79959.1 | 31.8 | 35.0 | 40.0 | 44.4 | 25.0 | 27.3 |
| DEX0488_019.nt.1 | 79960 | 40.9 | 40.9 | 50.0 | 50.0 | 33.3 | 33.3 |
| DEX0488_019.nt.1 | 79960.1 | 50.0 | 52.4 | 70.0 | 70.0 | 33.3 | 36.4 |
| DEX0488_019.nt.1 | 79963 | 36.4 | 36.4 | 50.0 | 50.0 | 25.0 | 25.0 |
| DEX0488_019.nt.1 | 79963.1 | 36.4 | 38.1 | 50.0 | 55.6 | 25.0 | 25.0 |
| DEX0488_019.nt.1 | 79964 | 22.7 | 23.8 | 40.0 | 44.4 | 8.3 | 8.3 |
| DEX0488_019.nt.1 | 79964.1 | 36.4 | 38.1 | 40.0 | 40.0 | 33.3 | 36.4 |
| DEX0488_019.nt.2 | 79955 | 22.7 | 22.7 | 30.0 | 30.0 | 16.7 | 16.7 |
| DEX0488_019.nt.2 | 79955.1 | 31.8 | 33.3 | 40.0 | 40.0 | 25.0 | 27.3 |
| DEX0488_019.nt.2 | 79956 | 36.4 | 36.4 | 50.0 | 50.0 | 25.0 | 25.0 |
| DEX0488_019.nt.2 | 79956.1 | 31.8 | 33.3 | 40.0 | 44.4 | 25.0 | 25.0 |
| DEX0488_019.nt.2 | 79959 | 31.8 | 33.3 | 40.0 | 44.4 | 25.0 | 25.0 |
| DEX0488_019.nt.2 | 79959.1 | 31.8 | 35.0 | 40.0 | 44.4 | 25.0 | 27.3 |
| DEX0488_019.nt.2 | 79960 | 40.9 | 40.9 | 50.0 | 50.0 | 33.3 | 33.3 |
| DEX0488_019.nt.2 | 79960.1 | 50.0 | 52.4 | 70.0 | 70.0 | 33.3 | 36.4 |
| DEX0488_019.nt.2 | 79963 | 36.4 | 36.4 | 50.0 | 50.0 | 25.0 | 25.0 |
| DEX0488_019.nt.2 | 79963.1 | 36.4 | 38.1 | 50.0 | 55.6 | 25.0 | 25.0 |
| DEX0488_019.nt.2 | 79964 | 22.7 | 23.8 | 40.0 | 44.4 | 8.3 | 8.3 |
| DEX0488_019.nt.2 | 79964.1 | 36.4 | 38.1 | 40.0 | 40.0 | 33.3 | 36.4 |
| DEX0488_019.nt.3 | 79955 | 22.7 | 22.7 | 30.0 | 30.0 | 16.7 | 16.7 |
| DEX0488_019.nt.3 | 79955.1 | 31.8 | 33.3 | 40.0 | 40.0 | 25.0 | 27.3 |
| DEX0488_019.nt.3 | 79956 | 36.4 | 36.4 | 50.0 | 50.0 | 25.0 | 25.0 |
| DEX0488_019.nt.3 | 79956.1 | 31.8 | 33.3 | 40.0 | 44.4 | 25.0 | 25.0 |
| DEX0488_019.nt.3 | 79959 | 31.8 | 33.3 | 40.0 | 44.4 | 25.0 | 25.0 |
| DEX0488_019.nt.3 | 79959.1 | 31.8 | 35.0 | 40.0 | 44.4 | 25.0 | 27.3 |
| DEX0488_019.nt.3 | 79960 | 40.9 | 40.9 | 50.0 | 50.0 | 33.3 | 33.3 |
| DEX0488_019.nt.3 | 79960.1 | 50.0 | 52.4 | 70.0 | 70.0 | 33.3 | 36.4 |
| DEX0488_019.nt.3 | 79963 | 36.4 | 36.4 | 50.0 | 50.0 | 25.0 | 25.0 |
| DEX0488_019.nt.3 | 79963.1 | 36.4 | 38.1 | 50.0 | 55.6 | 25.0 | 25.0 |
| DEX0488_019.nt.3 | 79964 | 22.7 | 23.8 | 40.0 | 44.4 | 8.3 | 8.3 |
| DEX0488_019.nt.3 | 79964.1 | 36.4 | 38.1 | 40.0 | 40.0 | 33.3 | 36.4 |
| DEX0488_019.nt.4 | 79955 | 22.7 | 22.7 | 30.0 | 30.0 | 16.7 | 16.7 |
| DEX0488_019.nt.4 | 79955.1 | 31.8 | 33.3 | 40.0 | 40.0 | 25.0 | 27.3 |
| DEX0488_019.nt.4 | 79956 | 36.4 | 36.4 | 50.0 | 50.0 | 25.0 | 25.0 |
| DEX0488_019.nt.4 | 79956.1 | 31.8 | 33.3 | 40.0 | 44.4 | 25.0 | 25.0 |
| DEX0488_019.nt.4 | 79959 | 31.8 | 33.3 | 40.0 | 44.4 | 25.0 | 25.0 |
| DEX0488_019.nt.4 | 79959.1 | 31.8 | 35.0 | 40.0 | 44.4 | 25.0 | 27.3 |
| DEX0488_019.nt.4 | 79960 | 40.9 | 40.9 | 50.0 | 50.0 | 33.3 | 33.3 |
| DEX0488_019.nt.4 | 79960.1 | 50.0 | 52.4 | 70.0 | 70.0 | 33.3 | 36.4 |
| DEX0488_019.nt.4 | 79963 | 36.4 | 36.4 | 50.0 | 50.0 | 25.0 | 25.0 |
| DEX0488_019.nt.4 | 79963.1 | 36.4 | 38.1 | 50.0 | 55.6 | 25.0 | 25.0 |
| DEX0488_019.nt.4 | 79964 | 22.7 | 23.8 | 40.0 | 44.4 | 8.3 | 8.3 |
| DEX0488_019.nt.4 | 79964.1 | 36.4 | 38.1 | 40.0 | 40.0 | 33.3 | 36.4 |
| DEX0488_019.nt.5 | 79959 | 31.8 | 33.3 | 40.0 | 44.4 | 25.0 | 25.0 |
| DEX0488_019.nt.5 | 79959.1 | 31.8 | 35.0 | 40.0 | 44.4 | 25.0 | 27.3 |
| DEX0488_019.nt.5 | 79960 | 40.9 | 40.9 | 50.0 | 50.0 | 33.3 | 33.3 |
| DEX0488_019.nt.5 | 79960.1 | 50.0 | 52.4 | 70.0 | 70.0 | 33.3 | 36.4 |
| DEX0488_019.nt.6 | 79955 | 22.7 | 22.7 | 30.0 | 30.0 | 16.7 | 16.7 |
| DEX0488_019.nt.6 | 79955.1 | 31.8 | 33.3 | 40.0 | 40.0 | 25.0 | 27.3 |
| DEX0488_019.nt.6 | 79956 | 36.4 | 36.4 | 50.0 | 50.0 | 25.0 | 25.0 |
| DEX0488_019.nt.6 | 79956.1 | 31.8 | 33.3 | 40.0 | 44.4 | 25.0 | 25.0 |
| DEX0488_019.nt.6 | 79959 | 31.8 | 33.3 | 40.0 | 44.4 | 25.0 | 25.0 |
| DEX0488_019.nt.6 | 79959.1 | 31.8 | 35.0 | 40.0 | 44.4 | 25.0 | 27.3 |
| DEX0488_019.nt.6 | 79960 | 40.9 | 40.9 | 50.0 | 50.0 | 33.3 | 33.3 |
| DEX0488_019.nt.6 | 79960.1 | 50.0 | 52.4 | 70.0 | 70.0 | 33.3 | 36.4 |
| DEX0488_019.nt.6 | 79963 | 36.4 | 36.4 | 50.0 | 50.0 | 25.0 | 25.0 |
| DEX0488_019.nt.6 | 79963.1 | 36.4 | 38.1 | 50.0 | 55.6 | 25.0 | 25.0 |
| DEX0488_019.nt.6 | 79964 | 22.7 | 23.8 | 40.0 | 44.4 | 8.3 | 8.3 |
| DEX0488_019.nt.6 | 79964.1 | 36.4 | 38.1 | 40.0 | 40.0 | 33.3 | 36.4 |
| DEX0488_019.nt.7 | 79955 | 22.7 | 22.7 | 30.0 | 30.0 | 16.7 | 16.7 |
| DEX0488_019.nt.7 | 79955.1 | 31.8 | 33.3 | 40.0 | 40.0 | 25.0 | 27.3 |
| DEX0488_019.nt.7 | 79956 | 36.4 | 36.4 | 50.0 | 50.0 | 25.0 | 25.0 |
| DEX0488_019.nt.7 | 79956.1 | 31.8 | 33.3 | 40.0 | 44.4 | 25.0 | 25.0 |
| DEX0488_019.nt.7 | 79959 | 31.8 | 33.3 | 40.0 | 44.4 | 25.0 | 25.0 |
| DEX0488_019.nt.7 | 79959.1 | 31.8 | 35.0 | 40.0 | 44.4 | 25.0 | 27.3 |
| DEX0488_019.nt.7 | 79960 | 40.9 | 40.9 | 50.0 | 50.0 | 33.3 | 33.3 |
| DEX0488_019.nt.7 | 79960.1 | 50.0 | 52.4 | 70.0 | 70.0 | 33.3 | 36.4 |
| DEX0488_019.nt.7 | 79963 | 36.4 | 36.4 | 50.0 | 50.0 | 25.0 | 25.0 |
| DEX0488_019.nt.7 | 79963.1 | 36.4 | 38.1 | 50.0 | 55.6 | 25.0 | 25.0 |
| DEX0488_019.nt.7 | 79964 | 22.7 | 23.8 | 40.0 | 44.4 | 8.3 | 8.3 |
| DEX0488_019.nt.7 | 79964.1 | 36.4 | 38.1 | 40.0 | 40.0 | 33.3 | 36.4 |
| DEX0488_019.nt.8 | 79955 | 22.7 | 22.7 | 30.0 | 30.0 | 16.7 | 16.7 |
| DEX0488_019.nt.8 | 79955.1 | 31.8 | 33.3 | 40.0 | 40.0 | 25.0 | 27.3 |
| DEX0488_019.nt.8 | 79956 | 36.4 | 36.4 | 50.0 | 50.0 | 25.0 | 25.0 |
| DEX0488_019.nt.8 | 79956.1 | 31.8 | 33.3 | 40.0 | 44.4 | 25.0 | 25.0 |
| DEX0488_019.nt.8 | 79959 | 31.8 | 33.3 | 40.0 | 44.4 | 25.0 | 25.0 |
| DEX0488_019.nt.8 | 79959.1 | 31.8 | 35.0 | 40.0 | 44.4 | 25.0 | 27.3 |
| DEX0488_019.nt.8 | 79960 | 40.9 | 40.9 | 50.0 | 50.0 | 33.3 | 33.3 |
| DEX0488_019.nt.8 | 79960.1 | 50.0 | 52.4 | 70.0 | 70.0 | 33.3 | 36.4 |
| DEX0488_019.nt.8 | 79963 | 36.4 | 36.4 | 50.0 | 50.0 | 25.0 | 25.0 |
| DEX0488_019.nt.8 | 79963.1 | 36.4 | 38.1 | 50.0 | 55.6 | 25.0 | 25.0 |
| DEX0488_019.nt.8 | 79964 | 22.7 | 23.8 | 40.0 | 44.4 | 8.3 | 8.3 |
| DEX0488_019.nt.8 | 79964.1 | 36.4 | 38.1 | 40.0 | 40.0 | 33.3 | 36.4 |
| DEX0488_020.nt.1 | 77771 | 9.1 | 25.0 | 0.0 | 0.0 | 16.7 | 28.6 |
| DEX0488_020.nt.1 | 77771.1 | 9.1 | 22.2 | 0.0 | 0.0 | 16.7 | 22.2 |
| DEX0488_020.nt.1 | 77772 | 9.1 | 33.3 | 0.0 | 0.0 | 16.7 | 40.0 |
| DEX0488_020.nt.1 | 77772.1 | 4.5 | 25.0 | 0.0 | 0.0 | 8.3 | 25.0 |
| DEX0488_021.nt.1 | 21187 | 13.6 | 13.6 | 10.0 | 10.0 | 16.7 | 16.7 |
| DEX0488_021.nt.1 | 21187.1 | 9.1 | 9.1 | 10.0 | 10.0 | 8.3 | 8.3 |
| DEX0488_021.nt.1 | 78927 | 18.2 | 18.2 | 20.0 | 20.0 | 16.7 | 16.7 |
| DEX0488_021.nt.1 | 78927.1 | 18.2 | 18.2 | 20.0 | 20.0 | 16.7 | 16.7 |
| DEX0488_021.nt.1 | 78928 | 0.0 | 0.0 | 0.0 | 0.0 | 0.0 | 0.0 |
| DEX0488_021.nt.1 | 78928.1 | 0.0 | 0.0 | 0.0 | 0.0 | 0.0 | 0.0 |
| DEX0488_021.nt.2 | 21187 | 13.6 | 13.6 | 10.0 | 10.0 | 16.7 | 16.7 |
| DEX0488_021.nt.2 | 21187.1 | 9.1 | 9.1 | 10.0 | 10.0 | 8.3 | 8.3 |
| DEX0488_021.nt.2 | 78927 | 18.2 | 18.2 | 20.0 | 20.0 | 16.7 | 16.7 |
| DEX0488_021.nt.2 | 78927.1 | 18.2 | 18.2 | 20.0 | 20.0 | 16.7 | 16.7 |
| DEX0488_021.nt.2 | 78928 | 0.0 | 0.0 | 0.0 | 0.0 | 0.0 | 0.0 |
| DEX0488_021.nt.2 | 78928.1 | 0.0 | 0.0 | 0.0 | 0.0 | 0.0 | 0.0 |
| DEX0488_022.nt.1 | 79699 | 0.0 | 0.0 | 0.0 | 0.0 | 0.0 | 0.0 |
| DEX0488_022.nt.1 | 79699.1 | 0.0 | 0.0 | 0.0 | 0.0 | 0.0 | 0.0 |
| DEX0488_022.nt.1 | 79700 | 0.0 | 0.0 | 0.0 | 0.0 | 0.0 | 0.0 |
| DEX0488_022.nt.1 | 79700.1 | 0.0 | 0.0 | 0.0 | 0.0 | 0.0 | 0.0 |
| DEX0488_022.nt.2 | 79699 | 0.0 | 0.0 | 0.0 | 0.0 | 0.0 | 0.0 |
| DEX0488_022.nt.2 | 79699.1 | 0.0 | 0.0 | 0.0 | 0.0 | 0.0 | 0.0 |
| DEX0488_022.nt.2 | 79700 | 0.0 | 0.0 | 0.0 | 0.0 | 0.0 | 0.0 |
| DEX0488_022.nt.2 | 79700.1 | 0.0 | 0.0 | 0.0 | 0.0 | 0.0 | 0.0 |
| DEX0488_022.nt.3 | 79699 | 0.0 | 0.0 | 0.0 | 0.0 | 0.0 | 0.0 |
| DEX0488_022.nt.3 | 79699.1 | 0.0 | 0.0 | 0.0 | 0.0 | 0.0 | 0.0 |
| DEX0488_022.nt.3 | 79700 | 0.0 | 0.0 | 0.0 | 0.0 | 0.0 | 0.0 |
| DEX0488_022.nt.3 | 79700.1 | 0.0 | 0.0 | 0.0 | 0.0 | 0.0 | 0.0 |
| DEX0488_022.nt.4 | 79699 | 0.0 | 0.0 | 0.0 | 0.0 | 0.0 | 0.0 |
| DEX0488_022.nt.4 | 79699.1 | 0.0 | 0.0 | 0.0 | 0.0 | 0.0 | 0.0 |
| DEX0488_022.nt.4 | 79700 | 0.0 | 0.0 | 0.0 | 0.0 | 0.0 | 0.0 |
| DEX0488_022.nt.4 | 79700.1 | 0.0 | 0.0 | 0.0 | 0.0 | 0.0 | 0.0 |
| DEX0488_022.nt.5 | 79699 | 0.0 | 0.0 | 0.0 | 0.0 | 0.0 | 0.0 |
| DEX0488_022.nt.5 | 79699.1 | 0.0 | 0.0 | 0.0 | 0.0 | 0.0 | 0.0 |
| DEX0488_022.nt.5 | 79700 | 0.0 | 0.0 | 0.0 | 0.0 | 0.0 | 0.0 |
| DEX0488_022.nt.5 | 79700.1 | 0.0 | 0.0 | 0.0 | 0.0 | 0.0 | 0.0 |
| DEX0488_022.nt.6 | 79699 | 0.0 | 0.0 | 0.0 | 0.0 | 0.0 | 0.0 |
| DEX0488_022.nt.6 | 79699.1 | 0.0 | 0.0 | 0.0 | 0.0 | 0.0 | 0.0 |
| DEX0488_022.nt.6 | 79700 | 0.0 | 0.0 | 0.0 | 0.0 | 0.0 | 0.0 |
| DEX0488_022.nt.6 | 79700.1 | 0.0 | 0.0 | 0.0 | 0.0 | 0.0 | 0.0 |
| DEX0488_022.nt.7 | 79699 | 0.0 | 0.0 | 0.0 | 0.0 | 0.0 | 0.0 |
| DEX0488_022.nt.7 | 79699.1 | 0.0 | 0.0 | 0.0 | 0.0 | 0.0 | 0.0 |
| DEX0488_022.nt.7 | 79700 | 0.0 | 0.0 | 0.0 | 0.0 | 0.0 | 0.0 |
| DEX0488_022.nt.7 | 79700.1 | 0.0 | 0.0 | 0.0 | 0.0 | 0.0 | 0.0 |
| DEX0488_022.nt.8 | 79699 | 0.0 | 0.0 | 0.0 | 0.0 | 0.0 | 0.0 |
| DEX0488_022.nt.8 | 79699.1 | 0.0 | 0.0 | 0.0 | 0.0 | 0.0 | 0.0 |
| DEX0488_022.nt.8 | 79700 | 0.0 | 0.0 | 0.0 | 0.0 | 0.0 | 0.0 |
| DEX0488_022.nt.8 | 79700.1 | 0.0 | 0.0 | 0.0 | 0.0 | 0.0 | 0.0 |
| DEX0488_023.nt.1 | 78715 | 72.7 | 72.7 | 90.0 | 90.0 | 58.3 | 58.3 |
| DEX0488_023.nt.1 | 78715.1 | 68.2 | 75.0 | 80.0 | 80.0 | 58.3 | 70.0 |
| DEX0488_023.nt.1 | 78716 | 77.3 | 77.3 | 90.0 | 90.0 | 66.7 | 66.7 |
| DEX0488_023.nt.1 | 78716.1 | 81.8 | 81.8 | 90.0 | 90.0 | 75.0 | 75.0 |
| DEX0488_023.nt.2 | 78715 | 72.7 | 72.7 | 90.0 | 90.0 | 58.3 | 58.3 |
| DEX0488_023.nt.2 | 78715.1 | 68.2 | 75.0 | 80.0 | 80.0 | 58.3 | 70.0 |
| DEX0488_023.nt.2 | 78716 | 77.3 | 77.3 | 90.0 | 90.0 | 66.7 | 66.7 |
| DEX0488_023.nt.2 | 78716.1 | 81.8 | 81.8 | 90.0 | 90.0 | 75.0 | 75.0 |
| DEX0488_024.nt.1 | 79699 | 0.0 | 0.0 | 0.0 | 0.0 | 0.0 | 0.0 |
| DEX0488_024.nt.1 | 79699.1 | 0.0 | 0.0 | 0.0 | 0.0 | 0.0 | 0.0 |
| DEX0488_024.nt.1 | 79700 | 0.0 | 0.0 | 0.0 | 0.0 | 0.0 | 0.0 |
| DEX0488_024.nt.1 | 79700.1 | 0.0 | 0.0 | 0.0 | 0.0 | 0.0 | 0.0 |
| DEX0488_024.nt.2 | 79699 | 0.0 | 0.0 | 0.0 | 0.0 | 0.0 | 0.0 |
| DEX0488_024.nt.2 | 79699.1 | 0.0 | 0.0 | 0.0 | 0.0 | 0.0 | 0.0 |
| DEX0488_024.nt.2 | 79700 | 0.0 | 0.0 | 0.0 | 0.0 | 0.0 | 0.0 |
| DEX0488_024.nt.2 | 79700.1 | 0.0 | 0.0 | 0.0 | 0.0 | 0.0 | 0.0 |
| DEX0488_025.nt.1 | 90527 | 0.0 | 0.0 | 0.0 | 0.0 | 0.0 | 0.0 |
| DEX0488_025.nt.1 | 90527.1 | 4.5 | 7.1 | 10.0 | 20.0 | 0.0 | 0.0 |
| DEX0488_025.nt.1 | 90528 | 0.0 | 0.0 | 0.0 | 0.0 | 0.0 | 0.0 |
| DEX0488_025.nt.1 | 90528.1 | 0.0 | 0.0 | 0.0 | 0.0 | 0.0 | 0.0 |
| DEX0488_025.nt.1 | 90543 | 0.0 | 0.0 | 0.0 | 0.0 | 0.0 | 0.0 |
| DEX0488_025.nt.1 | 90543.1 | 0.0 | 0.0 | 0.0 | 0.0 | 0.0 | 0.0 |
| DEX0488_025.nt.1 | 90544 | 0.0 | 0.0 | 0.0 | 0.0 | 0.0 | 0.0 |
| DEX0488_025.nt.1 | 90544.1 | 0.0 | 0.0 | 0.0 | 0.0 | 0.0 | 0.0 |
| DEX0488_025.nt.1 | 91047 | 0.0 | 0.0 | 0.0 | 0.0 | 0.0 | 0.0 |
| DEX0488_025.nt.1 | 91047.1 | 0.0 | 0.0 | 0.0 | 0.0 | 0.0 | 0.0 |
| DEX0488_025.nt.1 | 91048 | 0.0 | 0.0 | 0.0 | 0.0 | 0.0 | 0.0 |
| DEX0488_025.nt.1 | 91048.1 | 0.0 | 0.0 | 0.0 | 0.0 | 0.0 | 0.0 |
| DEX0488_025.nt.1 | 91051 | 0.0 | 0.0 | 0.0 | 0.0 | 0.0 | 0.0 |
| DEX0488_025.nt.1 | 91051.1 | 0.0 | 0.0 | 0.0 | 0.0 | 0.0 | 0.0 |
| DEX0488_025.nt.1 | 91052 | 0.0 | 0.0 | 0.0 | 0.0 | 0.0 | 0.0 |
| DEX0488_025.nt.1 | 91052.1 | 0.0 | 0.0 | 0.0 | 0.0 | 0.0 | 0.0 |
| DEX0488_025.nt.1 | 91055 | 0.0 | 0.0 | 0.0 | 0.0 | 0.0 | 0.0 |
| DEX0488_025.nt.1 | 91055.1 | 0.0 | 0.0 | 0.0 | 0.0 | 0.0 | 0.0 |
| DEX0488_025.nt.1 | 91056 | 0.0 | 0.0 | 0.0 | 0.0 | 0.0 | 0.0 |
| DEX0488_025.nt.1 | 91056.1 | 0.0 | 0.0 | 0.0 | 0.0 | 0.0 | 0.0 |
| DEX0488_025.nt.1 | 91171 | 0.0 | 0.0 | 0.0 | 0.0 | 0.0 | 0.0 |
| DEX0488_025.nt.1 | 91171.1 | 0.0 | 0.0 | 0.0 | 0.0 | 0.0 | 0.0 |
| DEX0488_025.nt.1 | 91172 | 0.0 | 0.0 | 0.0 | 0.0 | 0.0 | 0.0 |
| DEX0488_025.nt.1 | 91172.1 | 0.0 | 0.0 | 0.0 | 0.0 | 0.0 | 0.0 |
| DEX0488_025.nt.1 | 91271 | 0.0 | 0.0 | 0.0 | 0.0 | 0.0 | 0.0 |
| DEX0488_025.nt.1 | 91271.1 | 0.0 | 0.0 | 0.0 | 0.0 | 0.0 | 0.0 |
| DEX0488_025.nt.1 | 91272 | 0.0 | 0.0 | 0.0 | 0.0 | 0.0 | 0.0 |
| DEX0488_025.nt.1 | 91272.1 | 0.0 | 0.0 | 0.0 | 0.0 | 0.0 | 0.0 |
| DEX0488_025.nt.1 | 91275 | 0.0 | 0.0 | 0.0 | 0.0 | 0.0 | 0.0 |
| DEX0488_025.nt.1 | 91275.1 | 0.0 | 0.0 | 0.0 | 0.0 | 0.0 | 0.0 |
| DEX0488_025.nt.1 | 91276 | 0.0 | 0.0 | 0.0 | 0.0 | 0.0 | 0.0 |
| DEX0488_025.nt.1 | 91276.1 | 0.0 | 0.0 | 0.0 | 0.0 | 0.0 | 0.0 |
| DEX0488_025.nt.2 | 90528 | 0.0 | 0.0 | 0.0 | 0.0 | 0.0 | 0.0 |
| DEX0488_025.nt.2 | 90528.1 | 0.0 | 0.0 | 0.0 | 0.0 | 0.0 | 0.0 |
| DEX0488_025.nt.2 | 90544 | 0.0 | 0.0 | 0.0 | 0.0 | 0.0 | 0.0 |
| DEX0488_025.nt.2 | 90544.1 | 0.0 | 0.0 | 0.0 | 0.0 | 0.0 | 0.0 |
| DEX0488_025.nt.2 | 91172 | 0.0 | 0.0 | 0.0 | 0.0 | 0.0 | 0.0 |
| DEX0488_025.nt.2 | 91172.1 | 0.0 | 0.0 | 0.0 | 0.0 | 0.0 | 0.0 |
| DEX0488_025.nt.2 | 91272 | 0.0 | 0.0 | 0.0 | 0.0 | 0.0 | 0.0 |
| DEX0488_025.nt.2 | 91272.1 | 0.0 | 0.0 | 0.0 | 0.0 | 0.0 | 0.0 |
| DEX0488_025.nt.2 | 91276 | 0.0 | 0.0 | 0.0 | 0.0 | 0.0 | 0.0 |
| DEX0488_025.nt.2 | 91276.1 | 0.0 | 0.0 | 0.0 | 0.0 | 0.0 | 0.0 |
| DEX0488_026.nt.1 | 24160 | 0.0 | 0.0 | 0.0 | 0.0 | 0.0 | 0.0 |
| DEX0488_026.nt.1 | 24160.1 | 0.0 | 0.0 | 0.0 | 0.0 | 0.0 | 0.0 |
| DEX0488_026.nt.1 | 24160.2 | 0.0 | 0.0 | 0.0 | 0.0 | 0.0 | 0.0 |
| DEX0488_026.nt.1 | 24160.3 | 0.0 | 0.0 | 0.0 | 0.0 | 0.0 | 0.0 |
| DEX0488_026.nt.1 | 26816 | 0.0 | 0.0 | 0.0 | 0.0 | 0.0 | 0.0 |
| DEX0488_026.nt.1 | 26816.1 | 0.0 | 0.0 | 0.0 | 0.0 | 0.0 | 0.0 |
| DEX0488_027.nt.1 | 17852 | 9.1 | 9.5 | 10.0 | 11.1 | 8.3 | 8.3 |
| DEX0488_027.nt.1 | 17852.1 | 9.1 | 9.1 | 10.0 | 10.0 | 8.3 | 8.3 |
| DEX0488_027.nt.1 | 17853 | 13.6 | 14.3 | 20.0 | 22.2 | 8.3 | 8.3 |
| DEX0488_027.nt.1 | 17853.1 | 13.6 | 14.3 | 20.0 | 22.2 | 8.3 | 8.3 |
| DEX0488_027.nt.1 | 18644 | 9.1 | 9.5 | 10.0 | 11.1 | 8.3 | 8.3 |
| DEX0488_027.nt.1 | 18644.1 | 9.1 | 10.0 | 10.0 | 12.5 | 8.3 | 8.3 |
| DEX0488_027.nt.1 | 18644.2 | 9.1 | 9.5 | 10.0 | 11.1 | 8.3 | 8.3 |
| DEX0488_027.nt.1 | 18644.3 | 9.1 | 9.5 | 10.0 | 10.0 | 8.3 | 9.1 |
| DEX0488_027.nt.1 | 18645 | 13.6 | 14.3 | 20.0 | 22.2 | 8.3 | 8.3 |
| DEX0488_027.nt.1 | 18645.1 | 13.6 | 15.0 | 20.0 | 22.2 | 8.3 | 9.1 |
| DEX0488_027.nt.1 | 18645.2 | 13.6 | 14.3 | 20.0 | 22.2 | 8.3 | 8.3 |
| DEX0488_027.nt.1 | 18645.3 | 9.1 | 10.0 | 10.0 | 11.1 | 8.3 | 9.1 |
| DEX0488_027.nt.1 | 41955 | 9.1 | 11.1 | 10.0 | 14.3 | 8.3 | 9.1 |
| DEX0488_027.nt.1 | 41955.1 | 9.1 | 9.1 | 10.0 | 10.0 | 8.3 | 8.3 |
| DEX0488_027.nt.1 | 41955.2 | 9.1 | 11.8 | 10.0 | 12.5 | 8.3 | 11.1 |
| DEX0488_027.nt.1 | 41955.3 | 9.1 | 9.1 | 10.0 | 10.0 | 8.3 | 8.3 |
| DEX0488_027.nt.1 | 41955.4 | 9.1 | 9.1 | 10.0 | 10.0 | 8.3 | 8.3 |
| DEX0488_027.nt.1 | 41956 | 9.1 | 9.5 | 10.0 | 11.1 | 8.3 | 8.3 |
| DEX0488_027.nt.1 | 41956.1 | 9.1 | 12.5 | 10.0 | 12.5 | 8.3 | 12.5 |
| DEX0488_027.nt.1 | 41956.2 | 9.1 | 9.1 | 10.0 | 10.0 | 8.3 | 8.3 |
| DEX0488_027.nt.1 | 41956.3 | 9.1 | 9.5 | 10.0 | 11.1 | 8.3 | 8.3 |
| DEX0488_027.nt.1 | 41956.4 | 9.1 | 9.1 | 10.0 | 10.0 | 8.3 | 8.3 |
| DEX0488_027.nt.2 | 17852 | 9.1 | 9.5 | 10.0 | 11.1 | 8.3 | 8.3 |
| DEX0488_027.nt.2 | 17852.1 | 9.1 | 9.1 | 10.0 | 10.0 | 8.3 | 8.3 |
| DEX0488_027.nt.2 | 17853 | 13.6 | 14.3 | 20.0 | 22.2 | 8.3 | 8.3 |
| DEX0488_027.nt.2 | 17853.1 | 13.6 | 14.3 | 20.0 | 22.2 | 8.3 | 8.3 |
| DEX0488_027.nt.2 | 18644 | 9.1 | 9.5 | 10.0 | 11.1 | 8.3 | 8.3 |
| DEX0488_027.nt.2 | 18644.1 | 9.1 | 10.0 | 10.0 | 12.5 | 8.3 | 8.3 |
| DEX0488_027.nt.2 | 18644.2 | 9.1 | 9.5 | 10.0 | 11.1 | 8.3 | 8.3 |
| DEX0488_027.nt.2 | 18644.3 | 9.1 | 9.5 | 10.0 | 10.0 | 8.3 | 9.1 |
| DEX0488_027.nt.2 | 18645 | 13.6 | 14.3 | 20.0 | 22.2 | 8.3 | 8.3 |
| DEX0488_027.nt.2 | 18645.1 | 13.6 | 15.0 | 20.0 | 22.2 | 8.3 | 9.1 |
| DEX0488_027.nt.2 | 18645.2 | 13.6 | 14.3 | 20.0 | 22.2 | 8.3 | 8.3 |
| DEX0488_027.nt.2 | 18645.3 | 9.1 | 10.0 | 10.0 | 11.1 | 8.3 | 9.1 |
| DEX0488_027.nt.3 | 17852 | 9.1 | 9.5 | 10.0 | 11.1 | 8.3 | 8.3 |
| DEX0488_027.nt.3 | 17852.1 | 9.1 | 9.1 | 10.0 | 10.0 | 8.3 | 8.3 |
| DEX0488_027.nt.3 | 17853 | 13.6 | 14.3 | 20.0 | 22.2 | 8.3 | 8.3 |
| DEX0488_027.nt.3 | 17853.1 | 13.6 | 14.3 | 20.0 | 22.2 | 8.3 | 8.3 |
| DEX0488_027.nt.3 | 18644 | 9.1 | 9.5 | 10.0 | 11.1 | 8.3 | 8.3 |
| DEX0488_027.nt.3 | 18644.1 | 9.1 | 10.0 | 10.0 | 12.5 | 8.3 | 8.3 |
| DEX0488_027.nt.3 | 18644.2 | 9.1 | 9.5 | 10.0 | 11.1 | 8.3 | 8.3 |
| DEX0488_027.nt.3 | 18644.3 | 9.1 | 9.5 | 10.0 | 10.0 | 8.3 | 9.1 |
| DEX0488_027.nt.3 | 18645 | 13.6 | 14.3 | 20.0 | 22.2 | 8.3 | 8.3 |
| DEX0488_027.nt.3 | 18645.1 | 13.6 | 15.0 | 20.0 | 22.2 | 8.3 | 9.1 |
| DEX0488_027.nt.3 | 18645.2 | 13.6 | 14.3 | 20.0 | 22.2 | 8.3 | 8.3 |
| DEX0488_027.nt.3 | 18645.3 | 9.1 | 10.0 | 10.0 | 11.1 | 8.3 | 9.1 |
| DEX0488_027.nt.4 | 17852 | 9.1 | 9.5 | 10.0 | 11.1 | 8.3 | 8.3 |
| DEX0488_027.nt.4 | 17852.1 | 9.1 | 9.1 | 10.0 | 10.0 | 8.3 | 8.3 |
| DEX0488_027.nt.4 | 17853 | 13.6 | 14.3 | 20.0 | 22.2 | 8.3 | 8.3 |
| DEX0488_027.nt.4 | 17853.1 | 13.6 | 14.3 | 20.0 | 22.2 | 8.3 | 8.3 |
| DEX0488_027.nt.4 | 18644 | 9.1 | 9.5 | 10.0 | 11.1 | 8.3 | 8.3 |
| DEX0488_027.nt.4 | 18644.1 | 9.1 | 10.0 | 10.0 | 12.5 | 8.3 | 8.3 |
| DEX0488_027.nt.4 | 18644.2 | 9.1 | 9.5 | 10.0 | 11.1 | 8.3 | 8.3 |
| DEX0488_027.nt.4 | 18644.3 | 9.1 | 9.5 | 10.0 | 10.0 | 8.3 | 9.1 |
| DEX0488_027.nt.4 | 18645 | 13.6 | 14.3 | 20.0 | 22.2 | 8.3 | 8.3 |
| DEX0488_027.nt.4 | 18645.1 | 13.6 | 15.0 | 20.0 | 22.2 | 8.3 | 9.1 |
| DEX0488_027.nt.4 | 18645.2 | 13.6 | 14.3 | 20.0 | 22.2 | 8.3 | 8.3 |
| DEX0488_027.nt.4 | 18645.3 | 9.1 | 10.0 | 10.0 | 11.1 | 8.3 | 9.1 |
| DEX0488_028.nt.1 | 33088 | 31.8 | 31.8 | 20.0 | 20.0 | 41.7 | 41.7 |
| DEX0488_028.nt.1 | 33088.1 | 31.8 | 31.8 | 20.0 | 20.0 | 41.7 | 41.7 |
| DEX0488_028.nt.1 | 33088.2 | 31.8 | 31.8 | 20.0 | 20.0 | 41.7 | 41.7 |
| DEX0488_028.nt.1 | 33088.3 | 27.3 | 27.3 | 10.0 | 10.0 | 41.7 | 41.7 |
| DEX0488_029.nt.1 | 79635 | 36.4 | 36.4 | 40.0 | 40.0 | 33.3 | 33.3 |
| DEX0488_029.nt.1 | 79635.1 | 36.4 | 36.4 | 30.0 | 30.0 | 41.7 | 41.7 |
| DEX0488_030.nt.1 | 35317 | 9.1 | 13.3 | 0.0 | 0.0 | 16.7 | 18.2 |
| DEX0488_030.nt.1 | 35317.1 | 9.1 | 13.3 | 0.0 | 0.0 | 16.7 | 18.2 |
| DEX0488_031.nt.1 | 78587 | 31.8 | 31.8 | 30.0 | 30.0 | 33.3 | 33.3 |
| DEX0488_031.nt.1 | 78587.1 | 31.8 | 31.8 | 30.0 | 30.0 | 33.3 | 33.3 |
| DEX0488_031.nt.1 | 78588 | 36.4 | 36.4 | 40.0 | 40.0 | 33.3 | 33.3 |
| DEX0488_031.nt.1 | 78588.1 | 36.4 | 38.1 | 50.0 | 50.0 | 25.0 | 27.3 |
| DEX0488_032.nt.1 | 78711 | 27.3 | 27.3 | 20.0 | 20.0 | 33.3 | 33.3 |
| DEX0488_032.nt.1 | 78711.1 | 22.7 | 22.7 | 10.0 | 10.0 | 33.3 | 33.3 |
| DEX0488_032.nt.1 | 78712 | 27.3 | 27.3 | 20.0 | 20.0 | 33.3 | 33.3 |
| DEX0488_032.nt.1 | 78712.1 | 27.3 | 27.3 | 20.0 | 20.0 | 33.3 | 33.3 |
| DEX0488_033.nt.1 | 79019 | 18.2 | 18.2 | 30.0 | 30.0 | 8.3 | 8.3 |
| DEX0488_033.nt.1 | 79019.1 | 18.2 | 19.0 | 30.0 | 33.3 | 8.3 | 8.3 |
| DEX0488_033.nt.1 | 79020 | 22.7 | 22.7 | 40.0 | 40.0 | 8.3 | 8.3 |
| DEX0488_033.nt.1 | 79020.1 | 18.2 | 18.2 | 30.0 | 30.0 | 8.3 | 8.3 |
| DEX0488_033.nt.2 | 79019 | 18.2 | 18.2 | 30.0 | 30.0 | 8.3 | 8.3 |
| DEX0488_033.nt.2 | 79019.1 | 18.2 | 19.0 | 30.0 | 33.3 | 8.3 | 8.3 |
| DEX0488_033.nt.2 | 79020 | 22.7 | 22.7 | 40.0 | 40.0 | 8.3 | 8.3 |
| DEX0488_033.nt.2 | 79020.1 | 18.2 | 18.2 | 30.0 | 30.0 | 8.3 | 8.3 |
| DEX0488_034.nt.1 | 90123 | 9.1 | 33.3 | 10.0 | 50.0 | 8.3 | 25.0 |
| DEX0488_034.nt.1 | 90123.1 | 13.6 | 27.3 | 10.0 | 33.3 | 16.7 | 25.0 |
| DEX0488_034.nt.1 | 90124 | 13.6 | 27.3 | 10.0 | 33.3 | 16.7 | 25.0 |
| DEX0488_034.nt.1 | 90124.1 | 13.6 | 30.0 | 10.0 | 33.3 | 16.7 | 28.6 |
| DEX0488_035.nt.1 | 79903 | 9.1 | 9.1 | 20.0 | 20.0 | 0.0 | 0.0 |
| DEX0488_035.nt.1 | 79903.1 | 9.1 | 9.5 | 10.0 | 11.1 | 8.3 | 8.3 |
| DEX0488_035.nt.1 | 79904 | 9.1 | 9.1 | 10.0 | 10.0 | 8.3 | 8.3 |
| DEX0488_035.nt.1 | 79904.1 | 9.1 | 10.0 | 10.0 | 10.0 | 8.3 | 10.0 |
| DEX0488_035.nt.2 | 79903 | 9.1 | 9.1 | 20.0 | 20.0 | 0.0 | 0.0 |
| DEX0488_035.nt.2 | 79903.1 | 9.1 | 9.5 | 10.0 | 11.1 | 8.3 | 8.3 |
| DEX0488_035.nt.2 | 79904 | 9.1 | 9.1 | 10.0 | 10.0 | 8.3 | 8.3 |
| DEX0488_035.nt.2 | 79904.1 | 9.1 | 10.0 | 10.0 | 10.0 | 8.3 | 10.0 |
| DEX0488_036.nt.1 | 3976 | 0.0 | 0.0 | 0.0 | 0.0 | 0.0 | 0.0 |
| DEX0488_036.nt.1 | 3976.1 | 0.0 | 0.0 | 0.0 | 0.0 | 0.0 | 0.0 |
| DEX0488_036.nt.1 | 3977 | 0.0 | 0.0 | 0.0 | 0.0 | 0.0 | 0.0 |
| DEX0488_036.nt.1 | 3977.1 | 0.0 | 0.0 | 0.0 | 0.0 | 0.0 | 0.0 |
| DEX0488_036.nt.2 | 3976 | 0.0 | 0.0 | 0.0 | 0.0 | 0.0 | 0.0 |
| DEX0488_036.nt.2 | 3976.1 | 0.0 | 0.0 | 0.0 | 0.0 | 0.0 | 0.0 |
| DEX0488_036.nt.2 | 3977 | 0.0 | 0.0 | 0.0 | 0.0 | 0.0 | 0.0 |
| DEX0488_036.nt.2 | 3977.1 | 0.0 | 0.0 | 0.0 | 0.0 | 0.0 | 0.0 |

[0518] TABLE 23

| | | Lng | Lng | Lng | Lng | Lng | Lng |
|---|---|---|---|---|---|---|---|
| | | Multicancer | Multicancer | Multicancer | Multicancer | Multicancer | Multicancer |
| | | 550 ALL | 550 ALL | 550 SQ | 550 SQ | 550 AD | 550 AD |
| | Oligo | % up | % valid | % up | % valid | % up | % valid |
| DEX ID | Name | n = 22 | up n = 22 | n = 10 | up n = 10 | n = 12 | up n = 12 |
| DEX0488_001.nt.1 | 79931 | 36.4 | 36.4 | 50.0 | 50.0 | 25.0 | 25.0 |
| DEX0488_001.nt.1 | 79931.1 | 40.9 | 40.9 | 60.0 | 60.0 | 25.0 | 25.0 |
| DEX0488_001.nt.1 | 79932 | 50.0 | 52.4 | 60.0 | 60.0 | 41.7 | 45.5 |
| DEX0488_001.nt.1 | 79932.1 | 54.5 | 54.5 | 70.0 | 70.0 | 41.7 | 41.7 |
| DEX0488_001.nt.10 | 79931 | 36.4 | 36.4 | 50.0 | 50.0 | 25.0 | 25.0 |
| DEX0488_001.nt.10 | 79931.1 | 40.9 | 40.9 | 60.0 | 60.0 | 25.0 | 25.0 |
| DEX0488_001.nt.10 | 79932 | 50.0 | 52.4 | 60.0 | 60.0 | 41.7 | 45.5 |
| DEX0488_001.nt.10 | 79932.1 | 54.5 | 54.5 | 70.0 | 70.0 | 41.7 | 41.7 |
| DEX0488_001.nt.11 | 79931 | 36.4 | 36.4 | 50.0 | 50.0 | 25.0 | 25.0 |
| DEX0488_001.nt.11 | 79931.1 | 40.9 | 40.9 | 60.0 | 60.0 | 25.0 | 25.0 |
| DEX0488_001.nt.11 | 79932 | 50.0 | 52.4 | 60.0 | 60.0 | 41.7 | 45.5 |
| DEX0488_001.nt.11 | 79932.1 | 54.5 | 54.5 | 70.0 | 70.0 | 41.7 | 41.7 |
| DEX0488_001.nt.2 | 79931 | 36.4 | 36.4 | 50.0 | 50.0 | 25.0 | 25.0 |
| DEX0488_001.nt.2 | 79931.1 | 40.9 | 40.9 | 60.0 | 60.0 | 25.0 | 25.0 |
| DEX0488_001.nt.2 | 79932 | 50.0 | 52.4 | 60.0 | 60.0 | 41.7 | 45.5 |
| DEX0488_001.nt.2 | 79932.1 | 54.5 | 54.5 | 70.0 | 70.0 | 41.7 | 41.7 |
| DEX0488_001.nt.3 | 79931 | 36.4 | 36.4 | 50.0 | 50.0 | 25.0 | 25.0 |
| DEX0488_001.nt.3 | 79931.1 | 40.9 | 40.9 | 60.0 | 60.0 | 25.0 | 25.0 |
| DEX0488_001.nt.3 | 79932 | 50.0 | 52.4 | 60.0 | 60.0 | 41.7 | 45.5 |
| DEX0488_001.nt.3 | 79932.1 | 54.5 | 54.5 | 70.0 | 70.0 | 41.7 | 41.7 |
| DEX0488_001.nt.4 | 79931 | 36.4 | 36.4 | 50.0 | 50.0 | 25.0 | 25.0 |
| DEX0488_001.nt.4 | 79931.1 | 40.9 | 40.9 | 60.0 | 60.0 | 25.0 | 25.0 |
| DEX0488_001.nt.4 | 79932 | 50.0 | 52.4 | 60.0 | 60.0 | 41.7 | 45.5 |
| DEX0488_001.nt.4 | 79932.1 | 54.5 | 54.5 | 70.0 | 70.0 | 41.7 | 41.7 |
| DEX0488_001.nt.5 | 79931 | 36.4 | 36.4 | 50.0 | 50.0 | 25.0 | 25.0 |
| DEX0488_001.nt.5 | 79931.1 | 40.9 | 40.9 | 60.0 | 60.0 | 25.0 | 25.0 |
| DEX0488_001.nt.5 | 79932 | 50.0 | 52.4 | 60.0 | 60.0 | 41.7 | 45.5 |
| DEX0488_001.nt.5 | 79932.1 | 54.5 | 54.5 | 70.0 | 70.0 | 41.7 | 41.7 |
| DEX0488_001.nt.6 | 79931 | 36.4 | 36.4 | 50.0 | 50.0 | 25.0 | 25.0 |
| DEX0488_001.nt.6 | 79931.1 | 40.9 | 40.9 | 60.0 | 60.0 | 25.0 | 25.0 |
| DEX0488_001.nt.6 | 79932 | 50.0 | 52.4 | 60.0 | 60.0 | 41.7 | 45.5 |
| DEX0488_001.nt.6 | 79932.1 | 54.5 | 54.5 | 70.0 | 70.0 | 41.7 | 41.7 |
| DEX0488_001.nt.7 | 79931 | 36.4 | 36.4 | 50.0 | 50.0 | 25.0 | 25.0 |
| DEX0488_001.nt.7 | 79931.1 | 40.9 | 40.9 | 60.0 | 60.0 | 25.0 | 25.0 |
| DEX0488_001.nt.7 | 79932 | 50.0 | 52.4 | 60.0 | 60.0 | 41.7 | 45.5 |
| DEX0488_001.nt.7 | 79932.1 | 54.5 | 54.5 | 70.0 | 70.0 | 41.7 | 41.7 |
| DEX0488_001.nt.8 | 79931 | 36.4 | 36.4 | 50.0 | 50.0 | 25.0 | 25.0 |
| DEX0488_001.nt.8 | 79931.1 | 40.9 | 40.9 | 60.0 | 60.0 | 25.0 | 25.0 |
| DEX0488_001.nt.8 | 79932 | 50.0 | 52.4 | 60.0 | 60.0 | 41.7 | 45.5 |
| DEX0488_001.nt.8 | 79932.1 | 54.5 | 54.5 | 70.0 | 70.0 | 41.7 | 41.7 |
| DEX0488_001.nt.9 | 79931 | 36.4 | 36.4 | 50.0 | 50.0 | 25.0 | 25.0 |
| DEX0488_001.nt.9 | 79931.1 | 40.9 | 40.9 | 60.0 | 60.0 | 25.0 | 25.0 |
| DEX0488_001.nt.9 | 79932 | 50.0 | 52.4 | 60.0 | 60.0 | 41.7 | 45.5 |
| DEX0488_001.nt.9 | 79932.1 | 54.5 | 54.5 | 70.0 | 70.0 | 41.7 | 41.7 |
| DEX0488_002.nt.1 | 91111 | 0.0 | 0.0 | 0.0 | 0.0 | 0.0 | 0.0 |
| DEX0488_002.nt.1 | 91111.1 | 0.0 | 0.0 | 0.0 | 0.0 | 0.0 | 0.0 |
| DEX0488_002.nt.1 | 91112 | 0.0 | 0.0 | 0.0 | 0.0 | 0.0 | 0.0 |
| DEX0488_002.nt.1 | 91112.1 | 0.0 | 0.0 | 0.0 | 0.0 | 0.0 | 0.0 |
| DEX0488_003.nt.1 | 27921 | 4.5 | 4.5 | 0.0 | 0.0 | 8.3 | 8.3 |
| DEX0488_003.nt.1 | 27921.1 | 4.5 | 4.5 | 0.0 | 0.0 | 8.3 | 8.3 |
| DEX0488_003.nt.1 | 27922 | 4.5 | 4.5 | 0.0 | 0.0 | 8.3 | 8.3 |
| DEX0488_003.nt.1 | 27922.1 | 0.0 | 0.0 | 0.0 | 0.0 | 0.0 | 0.0 |
| DEX0488_003.nt.1 | 78855 | 9.1 | 9.1 | 0.0 | 0.0 | 16.7 | 16.7 |
| DEX0488_003.nt.1 | 78855.1 | 9.1 | 9.5 | 10.0 | 10.0 | 8.3 | 9.1 |
| DEX0488_003.nt.1 | 78856 | 9.1 | 9.1 | 0.0 | 0.0 | 16.7 | 16.7 |
| DEX0488_003.nt.1 | 78856.1 | 9.1 | 9.1 | 0.0 | 0.0 | 16.7 | 16.7 |
| DEX0488_003.nt.2 | 27921 | 4.5 | 4.5 | 0.0 | 0.0 | 8.3 | 8.3 |
| DEX0488_003.nt.2 | 27921.1 | 4.5 | 4.5 | 0.0 | 0.0 | 8.3 | 8.3 |
| DEX0488_003.nt.2 | 27922 | 4.5 | 4.5 | 0.0 | 0.0 | 8.3 | 8.3 |
| DEX0488_003.nt.2 | 27922.1 | 0.0 | 0.0 | 0.0 | 0.0 | 0.0 | 0.0 |
| DEX0488_003.nt.2 | 78855 | 9.1 | 9.1 | 0.0 | 0.0 | 16.7 | 16.7 |
| DEX0488_003.nt.2 | 78855.1 | 9.1 | 9.5 | 10.0 | 10.0 | 8.3 | 9.1 |
| DEX0488_003.nt.2 | 78856 | 9.1 | 9.1 | 0.0 | 0.0 | 16.7 | 16.7 |
| DEX0488_003.nt.2 | 78856.1 | 9.1 | 9.1 | 0.0 | 0.0 | 16.7 | 16.7 |
| DEX0488_003.nt.3 | 27921 | 4.5 | 4.5 | 0.0 | 0.0 | 8.3 | 8.3 |
| DEX0488_003.nt.3 | 27921.1 | 4.5 | 4.5 | 0.0 | 0.0 | 8.3 | 8.3 |
| DEX0488_003.nt.3 | 27922 | 4.5 | 4.5 | 0.0 | 0.0 | 8.3 | 8.3 |
| DEX0488_003.nt.3 | 27922.1 | 0.0 | 0.0 | 0.0 | 0.0 | 0.0 | 0.0 |
| DEX0488_003.nt.3 | 78855 | 9.1 | 9.1 | 0.0 | 0.0 | 16.7 | 16.7 |
| DEX0488_003.nt.3 | 78855.1 | 9.1 | 9.5 | 10.0 | 10.0 | 8.3 | 9.1 |
| DEX0488_003.nt.3 | 78856 | 9.1 | 9.1 | 0.0 | 0.0 | 16.7 | 16.7 |
| DEX0488_003.nt.3 | 78856.1 | 9.1 | 9.1 | 0.0 | 0.0 | 16.7 | 16.7 |
| DEX0488_003.nt.4 | 27921 | 4.5 | 4.5 | 0.0 | 0.0 | 8.3 | 8.3 |
| DEX0488_003.nt.4 | 27921.1 | 4.5 | 4.5 | 0.0 | 0.0 | 8.3 | 8.3 |
| DEX0488_003.nt.4 | 27922 | 4.5 | 4.5 | 0.0 | 0.0 | 8.3 | 8.3 |
| DEX0488_003.nt.4 | 27922.1 | 0.0 | 0.0 | 0.0 | 0.0 | 0.0 | 0.0 |
| DEX0488_003.nt.4 | 78855 | 9.1 | 9.1 | 0.0 | 0.0 | 16.7 | 16.7 |
| DEX0488_003.nt.4 | 78855.1 | 9.1 | 9.5 | 10.0 | 10.0 | 8.3 | 9.1 |
| DEX0488_003.nt.4 | 78856 | 9.1 | 9.1 | 0.0 | 0.0 | 16.7 | 16.7 |
| DEX0488_003.nt.4 | 78856.1 | 9.1 | 9.1 | 0.0 | 0.0 | 16.7 | 16.7 |
| DEX0488_003.nt.5 | 27921 | 4.5 | 4.5 | 0.0 | 0.0 | 8.3 | 8.3 |
| DEX0488_003.nt.5 | 27921.1 | 4.5 | 4.5 | 0.0 | 0.0 | 8.3 | 8.3 |
| DEX0488_003.nt.5 | 27922 | 4.5 | 4.5 | 0.0 | 0.0 | 8.3 | 8.3 |
| DEX0488_003.nt.5 | 27922.1 | 0.0 | 0.0 | 0.0 | 0.0 | 0.0 | 0.0 |
| DEX0488_003.nt.5 | 78855 | 9.1 | 9.1 | 0.0 | 0.0 | 16.7 | 16.7 |
| DEX0488_003.nt.5 | 78855.1 | 9.1 | 9.5 | 10.0 | 10.0 | 8.3 | 9.1 |
| DEX0488_003.nt.5 | 78856 | 9.1 | 9.1 | 0.0 | 0.0 | 16.7 | 16.7 |
| DEX0488_003.nt.5 | 78856.1 | 9.1 | 9.1 | 0.0 | 0.0 | 16.7 | 16.7 |
| DEX0488_003.nt.6 | 27921 | 4.5 | 4.5 | 0.0 | 0.0 | 8.3 | 8.3 |
| DEX0488_003.nt.6 | 27921.1 | 4.5 | 4.5 | 0.0 | 0.0 | 8.3 | 8.3 |
| DEX0488_003.nt.6 | 27922 | 4.5 | 4.5 | 0.0 | 0.0 | 8.3 | 8.3 |
| DEX0488_003.nt.6 | 27922.1 | 0.0 | 0.0 | 0.0 | 0.0 | 0.0 | 0.0 |
| DEX0488_003.nt.6 | 78855 | 9.1 | 9.1 | 0.0 | 0.0 | 16.7 | 16.7 |
| DEX0488_003.nt.6 | 78855.1 | 9.1 | 9.5 | 10.0 | 10.0 | 8.3 | 9.1 |
| DEX0488_003.nt.6 | 78856 | 9.1 | 9.1 | 0.0 | 0.0 | 16.7 | 16.7 |
| DEX0488_003.nt.6 | 78856.1 | 9.1 | 9.1 | 0.0 | 0.0 | 16.7 | 16.7 |
| DEX0488_003.nt.7 | 78855 | 9.1 | 9.1 | 0.0 | 0.0 | 16.7 | 16.7 |
| DEX0488_003.nt.7 | 78855.1 | 9.1 | 9.5 | 10.0 | 10.0 | 8.3 | 9.1 |
| DEX0488_003.nt.7 | 78856 | 9.1 | 9.1 | 0.0 | 0.0 | 16.7 | 16.7 |
| DEX0488_003.nt.7 | 78856.1 | 9.1 | 9.1 | 0.0 | 0.0 | 16.7 | 16.7 |
| DEX0488_004.nt.1 | 10666 | 4.5 | 7.1 | 0.0 | 0.0 | 8.3 | 11.1 |
| DEX0488_004.nt.1 | 10666.1 | 4.5 | 7.1 | 0.0 | 0.0 | 8.3 | 10.0 |
| DEX0488_004.nt.1 | 10667 | 4.5 | 16.7 | 0.0 | 0.0 | 8.3 | 20.0 |
| DEX0488_004.nt.1 | 10667.1 | 4.5 | 16.7 | 0.0 | 0.0 | 8.3 | 20.0 |
| DEX0488_005.nt.1 | 9744 | 13.6 | 13.6 | 20.0 | 20.0 | 8.3 | 8.3 |
| DEX0488_005.nt.1 | 9744.1 | 9.1 | 9.1 | 10.0 | 10.0 | 8.3 | 8.3 |
| DEX0488_005.nt.1 | 9745 | 13.6 | 13.6 | 20.0 | 20.0 | 8.3 | 8.3 |
| DEX0488_005.nt.1 | 9745.1 | 9.1 | 9.1 | 10.0 | 10.0 | 8.3 | 8.3 |
| DEX0488_006.nt.1 | 4353 | 40.9 | 56.2 | 50.0 | 83.3 | 33.3 | 40.0 |
| DEX0488_006.nt.1 | 4353.1 | 45.5 | 62.5 | 50.0 | 83.3 | 41.7 | 50.0 |
| DEX0488_006.nt.1 | 5804 | 45.5 | 58.8 | 60.0 | 85.7 | 33.3 | 40.0 |
| DEX0488_006.nt.1 | 5804.1 | 45.5 | 58.8 | 60.0 | 85.7 | 33.3 | 40.0 |
| DEX0488_006.nt.1 | 5804.2 | 45.5 | 58.8 | 60.0 | 85.7 | 33.3 | 40.0 |
| DEX0488_006.nt.1 | 92287 | 59.1 | 65.0 | 80.0 | 88.9 | 41.7 | 45.5 |
| DEX0488_006.nt.1 | 92287.1 | 59.1 | 65.0 | 70.0 | 87.5 | 50.0 | 50.0 |
| DEX0488_007.nt.1 | 41955 | 9.1 | 11.1 | 10.0 | 12.5 | 8.3 | 10.0 |
| DEX0488_007.nt.1 | 41955.1 | 9.1 | 10.5 | 10.0 | 12.5 | 8.3 | 9.1 |
| DEX0488_007.nt.1 | 41955.2 | 9.1 | 12.5 | 10.0 | 14.3 | 8.3 | 11.1 |
| DEX0488_007.nt.1 | 41955.3 | 9.1 | 10.5 | 10.0 | 12.5 | 8.3 | 9.1 |
| DEX0488_007.nt.1 | 41955.4 | 9.1 | 10.0 | 10.0 | 12.5 | 8.3 | 8.3 |
| DEX0488_007.nt.1 | 41956 | 9.1 | 11.1 | 10.0 | 12.5 | 8.3 | 10.0 |
| DEX0488_007.nt.1 | 41956.1 | 4.5 | 7.7 | 0.0 | 0.0 | 8.3 | 12.5 |
| DEX0488_007.nt.1 | 41956.2 | 9.1 | 10.5 | 10.0 | 12.5 | 8.3 | 9.1 |
| DEX0488_007.nt.1 | 41956.3 | 9.1 | 10.5 | 10.0 | 12.5 | 8.3 | 9.1 |
| DEX0488_007.nt.1 | 41956.4 | 9.1 | 10.5 | 10.0 | 12.5 | 8.3 | 9.1 |
| DEX0488_008.nt.1 | 17292 | 13.6 | 13.6 | 0.0 | 0.0 | 25.0 | 25.0 |
| DEX0488_008.nt.1 | 17292.1 | 13.6 | 13.6 | 0.0 | 0.0 | 25.0 | 25.0 |
| DEX0488_008.nt.1 | 17293 | 13.6 | 13.6 | 0.0 | 0.0 | 25.0 | 25.0 |
| DEX0488_008.nt.1 | 17293.1 | 13.6 | 16.7 | 0.0 | 0.0 | 25.0 | 33.3 |
| DEX0488_008.nt.1 | 2085 | 13.6 | 13.6 | 0.0 | 0.0 | 25.0 | 25.0 |
| DEX0488_008.nt.1 | 24404 | 13.6 | 14.3 | 0.0 | 0.0 | 25.0 | 25.0 |
| DEX0488_008.nt.1 | 24404.1 | 13.6 | 13.6 | 0.0 | 0.0 | 25.0 | 25.0 |
| DEX0488_008.nt.1 | 24405 | 13.6 | 13.6 | 0.0 | 0.0 | 25.0 | 25.0 |
| DEX0488_008.nt.1 | 24405.1 | 13.6 | 13.6 | 0.0 | 0.0 | 25.0 | 25.0 |
| DEX0488_008.nt.1 | 4909 | 13.6 | 13.6 | 0.0 | 0.0 | 25.0 | 25.0 |
| DEX0488_008.nt.1 | 4909.1 | 13.6 | 13.6 | 0.0 | 0.0 | 25.0 | 25.0 |
| DEX0488_008.nt.1 | 4910 | 13.6 | 13.6 | 0.0 | 0.0 | 25.0 | 25.0 |
| DEX0488_008.nt.1 | 4910.1 | 13.6 | 13.6 | 0.0 | 0.0 | 25.0 | 25.0 |
| DEX0488_008.nt.2 | 17292 | 13.6 | 13.6 | 0.0 | 0.0 | 25.0 | 25.0 |
| DEX0488_008.nt.2 | 17292.1 | 13.6 | 13.6 | 0.0 | 0.0 | 25.0 | 25.0 |
| DEX0488_008.nt.2 | 17293 | 13.6 | 13.6 | 0.0 | 0.0 | 25.0 | 25.0 |
| DEX0488_008.nt.2 | 17293.1 | 13.6 | 16.7 | 0.0 | 0.0 | 25.0 | 33.3 |
| DEX0488_008.nt.2 | 2085 | 13.6 | 13.6 | 0.0 | 0.0 | 25.0 | 25.0 |
| DEX0488_008.nt.2 | 24404 | 13.6 | 14.3 | 0.0 | 0.0 | 25.0 | 25.0 |
| DEX0488_008.nt.2 | 24404.1 | 13.6 | 13.6 | 0.0 | 0.0 | 25.0 | 25.0 |
| DEX0488_008.nt.2 | 24405 | 13.6 | 13.6 | 0.0 | 0.0 | 25.0 | 25.0 |
| DEX0488_008.nt.2 | 24405.1 | 13.6 | 13.6 | 0.0 | 0.0 | 25.0 | 25.0 |
| DEX0488_008.nt.2 | 4909 | 13.6 | 13.6 | 0.0 | 0.0 | 25.0 | 25.0 |
| DEX0488_008.nt.2 | 4909.1 | 13.6 | 13.6 | 0.0 | 0.0 | 25.0 | 25.0 |
| DEX0488_008.nt.2 | 4910 | 13.6 | 13.6 | 0.0 | 0.0 | 25.0 | 25.0 |
| DEX0488_008.nt.2 | 4910.1 | 13.6 | 13.6 | 0.0 | 0.0 | 25.0 | 25.0 |
| DEX0488_009.nt.1 | 79339 | 40.9 | 40.9 | 60.0 | 60.0 | 25.0 | 25.0 |
| DEX0488_009.nt.1 | 79339.1 | 36.4 | 36.4 | 60.0 | 60.0 | 16.7 | 16.7 |
| DEX0488_010.nt.1 | 26770 | 22.7 | 22.7 | 10.0 | 10.0 | 33.3 | 33.3 |
| DEX0488_010.nt.1 | 26770.1 | 22.7 | 22.7 | 10.0 | 10.0 | 33.3 | 33.3 |
| DEX0488_011.nt.1 | 33840 | 63.6 | 63.6 | 80.0 | 80.0 | 50.0 | 50.0 |
| DEX0488_011.nt.1 | 33840.1 | 72.7 | 72.7 | 100.0 | 100.0 | 50.0 | 50.0 |
| DEX0488_011.nt.1 | 33841 | 59.1 | 59.1 | 80.0 | 80.0 | 41.7 | 41.7 |
| DEX0488_011.nt.1 | 33841.1 | 59.1 | 59.1 | 80.0 | 80.0 | 41.7 | 41.7 |
| DEX0488_011.nt.1 | 39927 | 63.6 | 66.7 | 80.0 | 80.0 | 50.0 | 54.5 |
| DEX0488_011.nt.1 | 39927.1 | 68.2 | 68.2 | 90.0 | 90.0 | 50.0 | 50.0 |
| DEX0488_011.nt.1 | 39927.2 | 68.2 | 68.2 | 90.0 | 90.0 | 50.0 | 50.0 |
| DEX0488_011.nt.1 | 39927.3 | 63.6 | 63.6 | 80.0 | 80.0 | 50.0 | 50.0 |
| DEX0488_011.nt.1 | 39927.4 | 68.2 | 71.4 | 90.0 | 90.0 | 50.0 | 54.5 |
| DEX0488_011.nt.1 | 39928 | 59.1 | 59.1 | 80.0 | 80.0 | 41.7 | 41.7 |
| DEX0488_011.nt.1 | 39928.1 | 59.1 | 59.1 | 80.0 | 80.0 | 41.7 | 41.7 |
| DEX0488_011.nt.1 | 39928.2 | 54.5 | 57.1 | 70.0 | 77.8 | 41.7 | 41.7 |
| DEX0488_011.nt.1 | 39928.3 | 59.1 | 61.9 | 80.0 | 80.0 | 41.7 | 45.5 |
| DEX0488_011.nt.1 | 39928.4 | 59.1 | 59.1 | 80.0 | 80.0 | 41.7 | 41.7 |
| DEX0488_012.nt.1 | 21187 | 9.1 | 9.1 | 10.0 | 10.0 | 8.3 | 8.3 |
| DEX0488_012.nt.1 | 21187.1 | 9.1 | 9.1 | 10.0 | 10.0 | 8.3 | 8.3 |
| DEX0488_012.nt.1 | 21188 | 13.6 | 15.0 | 20.0 | 22.2 | 8.3 | 9.1 |
| DEX0488_012.nt.1 | 21188.1 | 18.2 | 20.0 | 20.0 | 22.2 | 16.7 | 18.2 |
| DEX0488_012.nt.1 | 78927 | 18.2 | 19.0 | 20.0 | 22.2 | 16.7 | 16.7 |
| DEX0488_012.nt.1 | 78927.1 | 18.2 | 20.0 | 20.0 | 22.2 | 16.7 | 18.2 |
| DEX0488_013.nt.1 | 79955 | 13.6 | 13.6 | 20.0 | 20.0 | 8.3 | 8.3 |
| DEX0488_013.nt.1 | 79955.1 | 27.3 | 28.6 | 40.0 | 40.0 | 16.7 | 18.2 |
| DEX0488_013.nt.1 | 79956 | 36.4 | 38.1 | 50.0 | 55.6 | 25.0 | 25.0 |
| DEX0488_013.nt.1 | 79956.1 | 27.3 | 28.6 | 40.0 | 44.4 | 16.7 | 16.7 |
| DEX0488_013.nt.1 | 79959 | 27.3 | 30.0 | 40.0 | 44.4 | 16.7 | 18.2 |
| DEX0488_013.nt.1 | 79959.1 | 27.3 | 31.6 | 40.0 | 44.4 | 16.7 | 20.0 |
| DEX0488_013.nt.1 | 79960 | 36.4 | 36.4 | 40.0 | 40.0 | 33.3 | 33.3 |
| DEX0488_013.nt.1 | 79960.1 | 40.9 | 40.9 | 60.0 | 60.0 | 25.0 | 25.0 |
| DEX0488_013.nt.1 | 79963 | 31.8 | 35.0 | 40.0 | 50.0 | 25.0 | 25.0 |
| DEX0488_013.nt.1 | 79963.1 | 31.8 | 35.0 | 50.0 | 55.6 | 16.7 | 18.2 |
| DEX0488_013.nt.1 | 79964 | 22.7 | 25.0 | 40.0 | 50.0 | 8.3 | 8.3 |
| DEX0488_013.nt.1 | 79964.1 | 27.3 | 31.6 | 40.0 | 50.0 | 16.7 | 18.2 |
| DEX0488_013.nt.2 | 79959 | 27.3 | 30.0 | 40.0 | 44.4 | 16.7 | 18.2 |
| DEX0488_013.nt.2 | 79959.1 | 27.3 | 31.6 | 40.0 | 44.4 | 16.7 | 20.0 |
| DEX0488_013.nt.2 | 79960 | 36.4 | 36.4 | 40.0 | 40.0 | 33.3 | 33.3 |
| DEX0488_013.nt.2 | 79960.1 | 40.9 | 40.9 | 60.0 | 60.0 | 25.0 | 25.0 |
| DEX0488_014.nt.1 | 90171 | 0.0 | 0.0 | 0.0 | 0.0 | 0.0 | 0.0 |
| DEX0488_014.nt.1 | 90171.1 | 0.0 | 0.0 | 0.0 | 0.0 | 0.0 | 0.0 |
| DEX0488_014.nt.1 | 90172 | 0.0 | 0.0 | 0.0 | 0.0 | 0.0 | 0.0 |
| DEX0488_014.nt.1 | 90172.1 | 0.0 | 0.0 | 0.0 | 0.0 | 0.0 | 0.0 |
| DEX0488_014.nt.2 | 90171 | 0.0 | 0.0 | 0.0 | 0.0 | 0.0 | 0.0 |
| DEX0488_014.nt.2 | 90171.1 | 0.0 | 0.0 | 0.0 | 0.0 | 0.0 | 0.0 |
| DEX0488_014.nt.2 | 90172 | 0.0 | 0.0 | 0.0 | 0.0 | 0.0 | 0.0 |
| DEX0488_014.nt.2 | 90172.1 | 0.0 | 0.0 | 0.0 | 0.0 | 0.0 | 0.0 |
| DEX0488_014.nt.3 | 90171 | 0.0 | 0.0 | 0.0 | 0.0 | 0.0 | 0.0 |
| DEX0488_014.nt.3 | 90171.1 | 0.0 | 0.0 | 0.0 | 0.0 | 0.0 | 0.0 |
| DEX0488_014.nt.3 | 90172 | 0.0 | 0.0 | 0.0 | 0.0 | 0.0 | 0.0 |
| DEX0488_014.nt.3 | 90172.1 | 0.0 | 0.0 | 0.0 | 0.0 | 0.0 | 0.0 |
| DEX0488_014.nt.4 | 90171 | 0.0 | 0.0 | 0.0 | 0.0 | 0.0 | 0.0 |
| DEX0488_014.nt.4 | 90171.1 | 0.0 | 0.0 | 0.0 | 0.0 | 0.0 | 0.0 |
| DEX0488_014.nt.4 | 90172 | 0.0 | 0.0 | 0.0 | 0.0 | 0.0 | 0.0 |
| DEX0488_014.nt.4 | 90172.1 | 0.0 | 0.0 | 0.0 | 0.0 | 0.0 | 0.0 |
| DEX0488_015.nt.1 | 78631 | 0.0 | 0.0 | 0.0 | 0.0 | 0.0 | 0.0 |
| DEX0488_015.nt.1 | 78631.1 | 4.5 | 9.1 | 0.0 | 0.0 | 8.3 | 12.5 |
| DEX0488_015.nt.1 | 78632 | 0.0 | 0.0 | 0.0 | 0.0 | 0.0 | 0.0 |
| DEX0488_015.nt.1 | 78632.1 | 0.0 | 0.0 | 0.0 | 0.0 | 0.0 | 0.0 |
| DEX0488_015.nt.2 | 78631 | 0.0 | 0.0 | 0.0 | 0.0 | 0.0 | 0.0 |
| DEX0488_015.nt.2 | 78631.1 | 4.5 | 9.1 | 0.0 | 0.0 | 8.3 | 12.5 |
| DEX0488_015.nt.2 | 78632 | 0.0 | 0.0 | 0.0 | 0.0 | 0.0 | 0.0 |
| DEX0488_015.nt.2 | 78632.1 | 0.0 | 0.0 | 0.0 | 0.0 | 0.0 | 0.0 |
| DEX0488_016.nt.1 | 79660 | 40.9 | 56.2 | 30.0 | 60.0 | 50.0 | 54.5 |
| DEX0488_016.nt.1 | 79660.1 | 36.4 | 44.4 | 20.0 | 33.3 | 50.0 | 50.0 |
| DEX0488_016.nt.10 | 79659 | 18.2 | 66.7 | 0.0 | 0.0 | 33.3 | 66.7 |
| DEX0488_016.nt.10 | 79659.1 | 18.2 | 66.7 | 0.0 | 0.0 | 33.3 | 66.7 |
| DEX0488_016.nt.10 | 79660 | 40.9 | 56.2 | 30.0 | 60.0 | 50.0 | 54.5 |
| DEX0488_016.nt.10 | 79660.1 | 36.4 | 44.4 | 20.0 | 33.3 | 50.0 | 50.0 |
| DEX0488_016.nt.11 | 79659 | 18.2 | 66.7 | 0.0 | 0.0 | 33.3 | 66.7 |
| DEX0488_016.nt.11 | 79659.1 | 18.2 | 66.7 | 0.0 | 0.0 | 33.3 | 66.7 |
| DEX0488_016.nt.11 | 79660 | 40.9 | 56.2 | 30.0 | 60.0 | 50.0 | 54.5 |
| DEX0488_016.nt.11 | 79660.1 | 36.4 | 44.4 | 20.0 | 33.3 | 50.0 | 50.0 |
| DEX0488_016.nt.2 | 79660 | 40.9 | 56.2 | 30.0 | 60.0 | 50.0 | 54.5 |
| DEX0488_016.nt.2 | 79660.1 | 36.4 | 44.4 | 20.0 | 33.3 | 50.0 | 50.0 |
| DEX0488_016.nt.3 | 79660 | 40.9 | 56.2 | 30.0 | 60.0 | 50.0 | 54.5 |
| DEX0488_016.nt.3 | 79660.1 | 36.4 | 44.4 | 20.0 | 33.3 | 50.0 | 50.0 |
| DEX0488_016.nt.4 | 79660 | 40.9 | 56.2 | 30.0 | 60.0 | 50.0 | 54.5 |
| DEX0488_016.nt.4 | 79660.1 | 36.4 | 44.4 | 20.0 | 33.3 | 50.0 | 50.0 |
| DEX0488_016.nt.5 | 79660 | 40.9 | 56.2 | 30.0 | 60.0 | 50.0 | 54.5 |
| DEX0488_016.nt.5 | 79660.1 | 36.4 | 44.4 | 20.0 | 33.3 | 50.0 | 50.0 |
| DEX0488_016.nt.6 | 79660 | 40.9 | 56.2 | 30.0 | 60.0 | 50.0 | 54.5 |
| DEX0488_016.nt.6 | 79660.1 | 36.4 | 44.4 | 20.0 | 33.3 | 50.0 | 50.0 |
| DEX0488_016.nt.7 | 79660 | 40.9 | 56.2 | 30.0 | 60.0 | 50.0 | 54.5 |
| DEX0488_016.nt.7 | 79660.1 | 36.4 | 44.4 | 20.0 | 33.3 | 50.0 | 50.0 |
| DEX0488_016.nt.8 | 79660 | 40.9 | 56.2 | 30.0 | 60.0 | 50.0 | 54.5 |
| DEX0488_016.nt.8 | 79660.1 | 36.4 | 44.4 | 20.0 | 33.3 | 50.0 | 50.0 |
| DEX0488_016.nt.9 | 79660 | 40.9 | 56.2 | 30.0 | 60.0 | 50.0 | 54.5 |
| DEX0488_016.nt.9 | 79660.1 | 36.4 | 44.4 | 20.0 | 33.3 | 50.0 | 50.0 |
| DEX0488_017.nt.1 | 4353 | 40.9 | 56.2 | 50.0 | 83.3 | 33.3 | 40.0 |
| DEX0488_017.nt.1 | 4353.1 | 45.5 | 62.5 | 50.0 | 83.3 | 41.7 | 50.0 |
| DEX0488_017.nt.1 | 5804 | 45.5 | 58.8 | 60.0 | 85.7 | 33.3 | 40.0 |
| DEX0488_017.nt.1 | 5804.1 | 45.5 | 58.8 | 60.0 | 85.7 | 33.3 | 40.0 |
| DEX0488_017.nt.1 | 5804.2 | 45.5 | 58.8 | 60.0 | 85.7 | 33.3 | 40.0 |
| DEX0488_017.nt.1 | 92287 | 59.1 | 65.0 | 80.0 | 88.9 | 41.7 | 45.5 |
| DEX0488_017.nt.1 | 92287.1 | 59.1 | 65.0 | 70.0 | 87.5 | 50.0 | 50.0 |
| DEX0488_018.nt.1 | 79936 | 63.6 | 63.6 | 80.0 | 80.0 | 50.0 | 50.0 |
| DEX0488_018.nt.1 | 79936.1 | 59.1 | 61.9 | 70.0 | 70.0 | 50.0 | 54.5 |
| DEX0488_018.nt.1 | 79944 | 59.1 | 61.9 | 70.0 | 70.0 | 50.0 | 54.5 |
| DEX0488_018.nt.1 | 79944.1 | 72.7 | 76.2 | 90.0 | 90.0 | 58.3 | 63.6 |
| DEX0488_018.nt.2 | 79936 | 63.6 | 63.6 | 80.0 | 80.0 | 50.0 | 50.0 |
| DEX0488_018.nt.2 | 79936.1 | 59.1 | 61.9 | 70.0 | 70.0 | 50.0 | 54.5 |
| DEX0488_018.nt.2 | 79944 | 59.1 | 61.9 | 70.0 | 70.0 | 50.0 | 54.5 |
| DEX0488_018.nt.2 | 79944.1 | 72.7 | 76.2 | 90.0 | 90.0 | 58.3 | 63.6 |
| DEX0488_018.nt.3 | 79936 | 63.6 | 63.6 | 80.0 | 80.0 | 50.0 | 50.0 |
| DEX0488_018.nt.3 | 79936.1 | 59.1 | 61.9 | 70.0 | 70.0 | 50.0 | 54.5 |
| DEX0488_018.nt.3 | 79944 | 59.1 | 61.9 | 70.0 | 70.0 | 50.0 | 54.5 |
| DEX0488_018.nt.3 | 79944.1 | 72.7 | 76.2 | 90.0 | 90.0 | 58.3 | 63.6 |
| DEX0488_018.nt.4 | 79936 | 63.6 | 63.6 | 80.0 | 80.0 | 50.0 | 50.0 |
| DEX0488_018.nt.4 | 79936.1 | 59.1 | 61.9 | 70.0 | 70.0 | 50.0 | 54.5 |
| DEX0488_018.nt.4 | 79944 | 59.1 | 61.9 | 70.0 | 70.0 | 50.0 | 54.5 |
| DEX0488_018.nt.4 | 79944.1 | 72.7 | 76.2 | 90.0 | 90.0 | 58.3 | 63.6 |
| DEX0488_018.nt.5 | 79936 | 63.6 | 63.6 | 80.0 | 80.0 | 50.0 | 50.0 |
| DEX0488_018.nt.5 | 79936.1 | 59.1 | 61.9 | 70.0 | 70.0 | 50.0 | 54.5 |
| DEX0488_018.nt.5 | 79944 | 59.1 | 61.9 | 70.0 | 70.0 | 50.0 | 54.5 |
| DEX0488_018.nt.5 | 79944.1 | 72.7 | 76.2 | 90.0 | 90.0 | 58.3 | 63.6 |
| DEX0488_018.nt.6 | 79936 | 63.6 | 63.6 | 80.0 | 80.0 | 50.0 | 50.0 |
| DEX0488_018.nt.6 | 79936.1 | 59.1 | 61.9 | 70.0 | 70.0 | 50.0 | 54.5 |
| DEX0488_018.nt.6 | 79944 | 59.1 | 61.9 | 70.0 | 70.0 | 50.0 | 54.5 |
| DEX0488_018.nt.6 | 79944.1 | 72.7 | 76.2 | 90.0 | 90.0 | 58.3 | 63.6 |
| DEX0488_018.nt.7 | 79936 | 63.6 | 63.6 | 80.0 | 80.0 | 50.0 | 50.0 |
| DEX0488_018.nt.7 | 79936.1 | 59.1 | 61.9 | 70.0 | 70.0 | 50.0 | 54.5 |
| DEX0488_018.nt.7 | 79944 | 59.1 | 61.9 | 70.0 | 70.0 | 50.0 | 54.5 |
| DEX0488_018.nt.7 | 79944.1 | 72.7 | 76.2 | 90.0 | 90.0 | 58.3 | 63.6 |
| DEX0488_018.nt.8 | 79936 | 63.6 | 63.6 | 80.0 | 80.0 | 50.0 | 50.0 |
| DEX0488_018.nt.8 | 79936.1 | 59.1 | 61.9 | 70.0 | 70.0 | 50.0 | 54.5 |
| DEX0488_018.nt.8 | 79944 | 59.1 | 61.9 | 70.0 | 70.0 | 50.0 | 54.5 |
| DEX0488_018.nt.8 | 79944.1 | 72.7 | 76.2 | 90.0 | 90.0 | 58.3 | 63.6 |
| DEX0488_019.nt.1 | 79955 | 13.6 | 13.6 | 20.0 | 20.0 | 8.3 | 8.3 |
| DEX0488_019.nt.1 | 79955.1 | 27.3 | 28.6 | 40.0 | 40.0 | 16.7 | 18.2 |
| DEX0488_019.nt.1 | 79956 | 36.4 | 38.1 | 50.0 | 55.6 | 25.0 | 25.0 |
| DEX0488_019.nt.1 | 79956.1 | 27.3 | 28.6 | 40.0 | 44.4 | 16.7 | 16.7 |
| DEX0488_019.nt.1 | 79959 | 27.3 | 30.0 | 40.0 | 44.4 | 16.7 | 18.2 |
| DEX0488_019.nt.1 | 79959.1 | 27.3 | 31.6 | 40.0 | 44.4 | 16.7 | 20.0 |
| DEX0488_019.nt.1 | 79960 | 36.4 | 36.4 | 40.0 | 40.0 | 33.3 | 33.3 |
| DEX0488_019.nt.1 | 79960.1 | 40.9 | 40.9 | 60.0 | 60.0 | 25.0 | 25.0 |
| DEX0488_019.nt.1 | 79963 | 31.8 | 35.0 | 40.0 | 50.0 | 25.0 | 25.0 |
| DEX0488_019.nt.1 | 79963.1 | 31.8 | 35.0 | 50.0 | 55.6 | 16.7 | 18.2 |
| DEX0488_019.nt.1 | 79964 | 22.7 | 25.0 | 40.0 | 50.0 | 8.3 | 8.3 |
| DEX0488_019.nt.1 | 79964.1 | 27.3 | 31.6 | 40.0 | 50.0 | 16.7 | 18.2 |
| DEX0488_019.nt.2 | 79955 | 13.6 | 13.6 | 20.0 | 20.0 | 8.3 | 8.3 |
| DEX0488_019.nt.2 | 79955.1 | 27.3 | 28.6 | 40.0 | 40.0 | 16.7 | 18.2 |
| DEX0488_019.nt.2 | 79956 | 36.4 | 38.1 | 50.0 | 55.6 | 25.0 | 25.0 |
| DEX0488_019.nt.2 | 79956.1 | 27.3 | 28.6 | 40.0 | 44.4 | 16.7 | 16.7 |
| DEX0488_019.nt.2 | 79959 | 27.3 | 30.0 | 40.0 | 44.4 | 16.7 | 18.2 |
| DEX0488_019.nt.2 | 79959.1 | 27.3 | 31.6 | 40.0 | 44.4 | 16.7 | 20.0 |
| DEX0488_019.nt.2 | 79960 | 36.4 | 36.4 | 40.0 | 40.0 | 33.3 | 33.3 |
| DEX0488_019.nt.2 | 79960.1 | 40.9 | 40.9 | 60.0 | 60.0 | 25.0 | 25.0 |
| DEX0488_019.nt.2 | 79963 | 31.8 | 35.0 | 40.0 | 50.0 | 25.0 | 25.0 |
| DEX0488_019.nt.2 | 79963.1 | 31.8 | 5.0 | 50.0 | 55.6 | 16.7 | 18.2 |
| DEX0488_019.nt.2 | 79964 | 22.7 | 25.0 | 40.0 | 50.0 | 8.3 | 8.3 |
| DEX0488_019.nt.2 | 79964.1 | 27.3 | 31.6 | 40.0 | 50.0 | 16.7 | 18.2 |
| DEX0488_019.nt.3 | 79955 | 13.6 | 13.6 | 20.0 | 20.0 | 8.3 | 8.3 |
| DEX0488_019.nt.3 | 79955.1 | 27.3 | 28.6 | 40.0 | 40.0 | 16.7 | 18.2 |
| DEX0488_019.nt.3 | 79956 | 36.4 | 38.1 | 50.0 | 55.6 | 25.0 | 25.0 |
| DEX0488_019.nt.3 | 79956.1 | 27.3 | 28.6 | 40.0 | 44.4 | 16.7 | 16.7 |
| DEX0488_019.nt.3 | 79959 | 27.3 | 30.0 | 40.0 | 44.4 | 16.7 | 18.2 |
| DEX0488_019.nt.3 | 79959.1 | 27.3 | 31.6 | 40.0 | 44.4 | 16.7 | 20.0 |
| DEX0488_019.nt.3 | 79960 | 36.4 | 36.4 | 40.0 | 40.0 | 33.3 | 33.3 |
| DEX0488_019.nt.3 | 79960.1 | 40.9 | 40.9 | 60.0 | 60.0 | 25.0 | 25.0 |
| DEX0488_019.nt.3 | 79963 | 31.8 | 35.0 | 40.0 | 50.0 | 25.0 | 25.0 |
| DEX0488_019.nt.3 | 79963.1 | 31.8 | 35.0 | 50.0 | 55.6 | 16.7 | 18.2 |
| DEX0488_019.nt.3 | 79964 | 22.7 | 25.0 | 40.0 | 50.0 | 8.3 | 8.3 |
| DEX0488_019.nt.3 | 79964.1 | 27.3 | 31.6 | 40.0 | 50.0 | 16.7 | 18.2 |
| DEX0488_019.nt.4 | 79955 | 13.6 | 13.6 | 20.0 | 20.0 | 8.3 | 8.3 |
| DEX0488_019.nt.4 | 79955.1 | 27.3 | 28.6 | 40.0 | 40.0 | 16.7 | 18.2 |
| DEX0488_019.nt.4 | 79956 | 36.4 | 38.1 | 50.0 | 55.6 | 25.0 | 25.0 |
| DEX0488_019.nt.4 | 79956.1 | 27.3 | 28.6 | 40.0 | 44.4 | 16.7 | 16.7 |
| DEX0488_019.nt.4 | 79959 | 27.3 | 30.0 | 40.0 | 44.4 | 16.7 | 18.2 |
| DEX0488_019.nt.4 | 79959.1 | 27.3 | 31.6 | 40.0 | 44.4 | 16.7 | 20.0 |
| DEX0488_019.nt.4 | 79960 | 36.4 | 36.4 | 40.0 | 40.0 | 33.3 | 33.3 |
| DEX0488_019.nt.4 | 79960.1 | 40.9 | 40.9 | 60.0 | 60.0 | 25.0 | 25.0 |
| DEX0488_019.nt.4 | 79963 | 31.8 | 35.0 | 40.0 | 50.0 | 25.0 | 25.0 |
| DEX0488_019.nt.4 | 79963.1 | 31.8 | 35.0 | 50.0 | 55.6 | 16.7 | 18.2 |
| DEX0488_019.nt.4 | 79964 | 22.7 | 25.0 | 40.0 | 50.0 | 8.3 | 8.3 |
| DEX0488_019.nt.4 | 79964.1 | 27.3 | 31.6 | 40.0 | 50.0 | 16.7 | 18.2 |
| DEX0488_019.nt.5 | 79959 | 27.3 | 30.0 | 40.0 | 44.4 | 16.7 | 18.2 |
| DEX0488_019.nt.5 | 79959.1 | 27.3 | 31.6 | 40.0 | 44.4 | 16.7 | 20.0 |
| DEX0488_019.nt.5 | 79960 | 36.4 | 36.4 | 40.0 | 40.0 | 33.3 | 33.3 |
| DEX0488_019.nt.5 | 79960.1 | 40.9 | 40.9 | 60.0 | 60.0 | 25.0 | 25.0 |
| DEX0488_019.nt.6 | 79955 | 13.6 | 13.6 | 20.0 | 20.0 | 8.3 | 8.3 |
| DEX0488_019.nt.6 | 79955.1 | 27.3 | 28.6 | 40.0 | 40.0 | 16.7 | 18.2 |
| DEX0488_019.nt.6 | 79956 | 36.4 | 38.1 | 50.0 | 55.6 | 25.0 | 25.0 |
| DEX0488_019.nt.6 | 79956.1 | 27.3 | 28.6 | 40.0 | 44.4 | 16.7 | 16.7 |
| DEX0488_019.nt.6 | 79959 | 27.3 | 30.0 | 40.0 | 44.4 | 16.7 | 18.2 |
| DEX0488_019.nt.6 | 79959.1 | 27.3 | 31.6 | 40.0 | 44.4 | 16.7 | 20.0 |
| DEX0488_019.nt.6 | 79960 | 36.4 | 36.4 | 40.0 | 40.0 | 33.3 | 33.3 |
| DEX0488_019.nt.6 | 79960.1 | 40.9 | 40.9 | 60.0 | 60.0 | 25.0 | 25.0 |
| DEX0488_019.nt.6 | 79963 | 31.8 | 35.0 | 40.0 | 50.0 | 25.0 | 25.0 |
| DEX0488_019.nt.6 | 79963.1 | 31.8 | 35.0 | 50.0 | 55.6 | 16.7 | 18.2 |
| DEX0488_019.nt.6 | 79964 | 22.7 | 25.0 | 40.0 | 50.0 | 8.3 | 8.3 |
| DEX0488_019.nt.6 | 79964.1 | 27.3 | 31.6 | 40.0 | 50.0 | 16.7 | 18.2 |
| DEX0488_019.nt.7 | 79955 | 13.6 | 13.6 | 20.0 | 20.0 | 8.3 | 8.3 |
| DEX0488_019.nt.7 | 79955.1 | 27.3 | 28.6 | 40.0 | 40.0 | 16.7 | 18.2 |
| DEX0488_019.nt.7 | 79956 | 36.4 | 38.1 | 50.0 | 55.6 | 25.0 | 25.0 |
| DEX0488_019.nt.7 | 79956.1 | 27.3 | 28.6 | 40.0 | 44.4 | 16.7 | 16.7 |
| DEX0488_019.nt.7 | 79959 | 27.3 | 30.0 | 40.0 | 44.4 | 16.7 | 18.2 |
| DEX0488_019.nt.7 | 79959.1 | 27.3 | 31.6 | 40.0 | 44.4 | 16.7 | 20.0 |
| DEX0488_019.nt.7 | 79960 | 36.4 | 36.4 | 40.0 | 40.0 | 33.3 | 33.3 |
| DEX0488_019.nt.7 | 79960.1 | 40.9 | 40.9 | 60.0 | 60.0 | 25.0 | 25.0 |
| DEX0488_019.nt.7 | 79963 | 31.8 | 35.0 | 40.0 | 50.0 | 25.0 | 25.0 |
| DEX0488_019.nt.7 | 79963.1 | 31.8 | 35.0 | 50.0 | 55.6 | 16.7 | 18.2 |
| DEX0488_019.nt.7 | 79964 | 22.7 | 25.0 | 40.0 | 50.0 | 8.3 | 8.3 |
| DEX0488_019.nt.7 | 79964.1 | 27.3 | 31.6 | 40.0 | 50.0 | 16.7 | 18.2 |
| DEX0488_019.nt.8 | 79955 | 13.6 | 13.6 | 20.0 | 20.0 | 8.3 | 8.3 |
| DEX0488_019.nt.8 | 79955.1 | 27.3 | 28.6 | 40.0 | 40.0 | 16.7 | 18.2 |
| DEX0488_019.nt.8 | 79956 | 36.4 | 38.1 | 50.0 | 55.6 | 25.0 | 25.0 |
| DEX0488_019.nt.8 | 79956.1 | 27.3 | 28.6 | 40.0 | 44.4 | 16.7 | 16.7 |
| DEX0488_019.nt.8 | 79959 | 27.3 | 30.0 | 40.0 | 44.4 | 16.7 | 18.2 |
| DEX0488_019.nt.8 | 79959.1 | 27.3 | 31.6 | 40.0 | 44.4 | 16.7 | 20.0 |
| DEX0488_019.nt.8 | 79960 | 36.4 | 36.4 | 40.0 | 40.0 | 33.3 | 33.3 |
| DEX0488_019.nt.8 | 79960.1 | 40.9 | 40.9 | 60.0 | 60.0 | 25.0 | 25.0 |
| DEX0488_019.nt.8 | 79963 | 31.8 | 35.0 | 40.0 | 50.0 | 25.0 | 25.0 |
| DEX0488_019.nt.8 | 79963.1 | 31.8 | 35.0 | 50.0 | 55.6 | 16.7 | 18.2 |
| DEX0488_019.nt.8 | 79964 | 22.7 | 25.0 | 40.0 | 50.0 | 8.3 | 8.3 |
| DEX0488_019.nt.8 | 79964.1 | 27.3 | 31.6 | 40.0 | 50.0 | 16.7 | 18.2 |
| DEX0488_020.nt.1 | 77771 | 9.1 | 50.0 | 0.0 | 0.0 | 16.7 | 66.7 |
| DEX0488_020.nt.1 | 77771.1 | 9.1 | 66.7 | 0.0 | 0.0 | 16.7 | 66.7 |
| DEX0488_020.nt.1 | 77772 | 9.1 | 50.0 | 0.0 | 0.0 | 16.7 | 66.7 |
| DEX0488_020.nt.1 | 77772.1 | 9.1 | 66.7 | 0.0 | 0.0 | 16.7 | 66.7 |
| DEX0488_021.nt.1 | 21187 | 9.1 | 9.1 | 10.0 | 10.0 | 8.3 | 8.3 |
| DEX0488_021.nt.1 | 21187.1 | 9.1 | 9.1 | 10.0 | 10.0 | 8.3 | 8.3 |
| DEX0488_021.nt.1 | 78927 | 18.2 | 19.0 | 20.0 | 22.2 | 16.7 | 16.7 |
| DEX0488_021.nt.1 | 78927.1 | 18.2 | 20.0 | 20.0 | 22.2 | 16.7 | 18.2 |
| DEX0488_021.nt.1 | 78928 | 0.0 | 0.0 | 0.0 | 0.0 | 0.0 | 0.0 |
| DEX0488_021.nt.1 | 78928.1 | 0.0 | 0.0 | 0.0 | 0.0 | 0.0 | 0.0 |
| DEX0488_021.nt.2 | 21187 | 9.1 | 9.1 | 10.0 | 10.0 | 8.3 | 8.3 |
| DEX0488_021.nt.2 | 21187.1 | 9.1 | 9.1 | 10.0 | 10.0 | 8.3 | 8.3 |
| DEX0488_021.nt.2 | 78927 | 18.2 | 19.0 | 20.0 | 22.2 | 16.7 | 16.7 |
| DEX0488_021.nt.2 | 78927.1 | 18.2 | 20.0 | 20.0 | 22.2 | 16.7 | 18.2 |
| DEX0488_021.nt.2 | 78928 | 0.0 | 0.0 | 0.0 | 0.0 | 0.0 | 0.0 |
| DEX0488_021.nt.2 | 78928.1 | 0.0 | 0.0 | 0.0 | 0.0 | 0.0 | 0.0 |
| DEX0488_022.nt.1 | 79699 | 0.0 | 0.0 | 0.0 | 0.0 | 0.0 | 0.0 |
| DEX0488_022.nt.1 | 79699.1 | 0.0 | 0.0 | 0.0 | 0.0 | 0.0 | 0.0 |
| DEX0488_022.nt.1 | 79700 | 0.0 | 0.0 | 0.0 | 0.0 | 0.0 | 0.0 |
| DEX0488_022.nt.1 | 79700.1 | 0.0 | 0.0 | 0.0 | 0.0 | 0.0 | 0.0 |
| DEX0488_022.nt.2 | 79699 | 0.0 | 0.0 | 0.0 | 0.0 | 0.0 | 0.0 |
| DEX0488_022.nt.2 | 79699.1 | 0.0 | 0.0 | 0.0 | 0.0 | 0.0 | 0.0 |
| DEX0488_022.nt.2 | 79700 | 0.0 | 0.0 | 0.0 | 0.0 | 0.0 | 0.0 |
| DEX0488_022.nt.2 | 79700.1 | 0.0 | 0.0 | 0.0 | 0.0 | 0.0 | 0.0 |
| DEX0488_022.nt.3 | 79699 | 0.0 | 0.0 | 0.0 | 0.0 | 0.0 | 0.0 |
| DEX0488_022.nt.3 | 79699.1 | 0.0 | 0.0 | 0.0 | 0.0 | 0.0 | 0.0 |
| DEX0488_022.nt.3 | 79700 | 0.0 | 0.0 | 0.0 | 0.0 | 0.0 | 0.0 |
| DEX0488_022.nt.3 | 79700.1 | 0.0 | 0.0 | 0.0 | 0.0 | 0.0 | 0.0 |
| DEX0488_022.nt.4 | 79699 | 0.0 | 0.0 | 0.0 | 0.0 | 0.0 | 0.0 |
| DEX0488_022.nt.4 | 79699.1 | 0.0 | 0.0 | 0.0 | 0.0 | 0.0 | 0.0 |
| DEX0488_022.nt.4 | 79700 | 0.0 | 0.0 | 0.0 | 0.0 | 0.0 | 0.0 |
| DEX0488_022.nt.4 | 79700.1 | 0.0 | 0.0 | 0.0 | 0.0 | 0.0 | 0.0 |
| DEX0488_022.nt.5 | 79699 | 0.0 | 0.0 | 0.0 | 0.0 | 0.0 | 0.0 |
| DEX0488_022.nt.5 | 79699.1 | 0.0 | 0.0 | 0.0 | 0.0 | 0.0 | 0.0 |
| DEX0488_022.nt.5 | 79700 | 0.0 | 0.0 | 0.0 | 0.0 | 0.0 | 0.0 |
| DEX0488_022.nt.5 | 79700.1 | 0.0 | 0.0 | 0.0 | 0.0 | 0.0 | 0.0 |
| DEX0488_022.nt.6 | 79699 | 0.0 | 0.0 | 0.0 | 0.0 | 0.0 | 0.0 |
| DEX0488_022.nt.6 | 79699.1 | 0.0 | 0.0 | 0.0 | 0.0 | 0.0 | 0.0 |
| DEX0488_022.nt.6 | 79700 | 0.0 | 0.0 | 0.0 | 0.0 | 0.0 | 0.0 |
| DEX0488_022.nt.6 | 79700.1 | 0.0 | 0.0 | 0.0 | 0.0 | 0.0 | 0.0 |
| DEX0488_022.nt.7 | 79699 | 0.0 | 0.0 | 0.0 | 0.0 | 0.0 | 0.0 |
| DEX0488_022.nt.7 | 79699.1 | 0.0 | 0.0 | 0.0 | 0.0 | 0.0 | 0.0 |
| DEX0488_022.nt.7 | 79700 | 0.0 | 0.0 | 0.0 | 0.0 | 0.0 | 0.0 |
| DEX0488_022.nt.7 | 79700.1 | 0.0 | 0.0 | 0.0 | 0.0 | 0.0 | 0.0 |
| DEX0488_022.nt.8 | 79699 | 0.0 | 0.0 | 0.0 | 0.0 | 0.0 | 0.0 |
| DEX0488_022.nt.8 | 79699.1 | 0.0 | 0.0 | 0.0 | 0.0 | 0.0 | 0.0 |
| DEX0488_022.nt.8 | 79700 | 0.0 | 0.0 | 0.0 | 0.0 | 0.0 | 0.0 |
| DEX0488_022.nt.8 | 79700.1 | 0.0 | 0.0 | 0.0 | 0.0 | 0.0 | 0.0 |
| DEX0488_023.nt.1 | 78715 | 77.3 | 77.3 | 90.0 | 90.0 | 66.7 | 66.7 |
| DEX0488_023.nt.1 | 78715.1 | 68.2 | 71.4 | 80.0 | 80.0 | 58.3 | 63.6 |
| DEX0488_023.nt.1 | 78716 | 81.8 | 81.8 | 90.0 | 90.0 | 75.0 | 75.0 |
| DEX0488_023.nt.1 | 78716.1 | 77.3 | 77.3 | 90.0 | 90.0 | 66.7 | 66.7 |
| DEX0488_023.nt.2 | 78715 | 77.3 | 77.3 | 90.0 | 90.0 | 66.7 | 66.7 |
| DEX0488_023.nt.2 | 78715.1 | 68.2 | 71.4 | 80.0 | 80.0 | 58.3 | 63.6 |
| DEX0488_023.nt.2 | 78716 | 81.8 | 81.8 | 90.0 | 90.0 | 75.0 | 75.0 |
| DEX0488_023.nt.2 | 78716.1 | 77.3 | 77.3 | 90.0 | 90.0 | 66.7 | 66.7 |
| DEX0488_024.nt.1 | 79699 | 0.0 | 0.0 | 0.0 | 0.0 | 0.0 | 0.0 |
| DEX0488_024.nt.1 | 79699.1 | 0.0 | 0.0 | 0.0 | 0.0 | 0.0 | 0.0 |
| DEX0488_024.nt.1 | 79700 | 0.0 | 0.0 | 0.0 | 0.0 | 0.0 | 0.0 |
| DEX0488_024.nt.1 | 79700.1 | 0.0 | 0.0 | 0.0 | 0.0 | 0.0 | 0.0 |
| DEX0488_024.nt.2 | 79699 | 0.0 | 0.0 | 0.0 | 0.0 | 0.0 | 0.0 |
| DEX0488_024.nt.2 | 79699.1 | 0.0 | 0.0 | 0.0 | 0.0 | 0.0 | 0.0 |
| DEX0488_024.nt.2 | 79700 | 0.0 | 0.0 | 0.0 | 0.0 | 0.0 | 0.0 |
| DEX0488_024.nt.2 | 79700.1 | 0.0 | 0.0 | 0.0 | 0.0 | 0.0 | 0.0 |
| DEX0488_025.nt.1 | 90527 | 0.0 | 0.0 | 0.0 | 0.0 | 0.0 | 0.0 |
| DEX0488_025.nt.1 | 90527.1 | 0.0 | 0.0 | 0.0 | 0.0 | 0.0 | 0.0 |
| DEX0488_025.nt.1 | 90528 | 0.0 | 0.0 | 0.0 | 0.0 | 0.0 | 0.0 |
| DEX0488_025.nt.1 | 90528.1 | 0.0 | 0.0 | 0.0 | 0.0 | 0.0 | 0.0 |
| DEX0488_025.nt.1 | 90543 | 0.0 | 0.0 | 0.0 | 0.0 | 0.0 | 0.0 |
| DEX0488_025.nt.1 | 90543.1 | 4.5 | 10.0 | 10.0 | 25.0 | 0.0 | 0.0 |
| DEX0488_025.nt.1 | 90544 | 0.0 | 0.0 | 0.0 | 0.0 | 0.0 | 0.0 |
| DEX0488_025.nt.1 | 90544.1 | 0.0 | 0.0 | 0.0 | 0.0 | 0.0 | 0.0 |
| DEX0488_025.nt.1 | 91047 | 0.0 | 0.0 | 0.0 | 0.0 | 0.0 | 0.0 |
| DEX0488_025.nt.1 | 91047.1 | 0.0 | 0.0 | 0.0 | 0.0 | 0.0 | 0.0 |
| DEX0488_025.nt.1 | 91048 | 0.0 | 0.0 | 0.0 | 0.0 | 0.0 | 0.0 |
| DEX0488_025.nt.1 | 91048.1 | 0.0 | 0.0 | 0.0 | 0.0 | 0.0 | 0.0 |
| DEX0488_025.nt.1 | 91051 | 0.0 | 0.0 | 0.0 | 0.0 | 0.0 | 0.0 |
| DEX0488_025.nt.1 | 91051.1 | 0.0 | 0.0 | 0.0 | 0.0 | 0.0 | 0.0 |
| DEX0488_025.nt.1 | 91052 | 0.0 | 0.0 | 0.0 | 0.0 | 0.0 | 0.0 |
| DEX0488_025.nt.1 | 91052.1 | 0.0 | 0.0 | 0.0 | 0.0 | 0.0 | 0.0 |
| DEX0488_025.nt.1 | 91055 | 0.0 | 0.0 | 0.0 | 0.0 | 0.0 | 0.0 |
| DEX0488_025.nt.1 | 91055.1 | 0.0 | 0.0 | 0.0 | 0.0 | 0.0 | 0.0 |
| DEX0488_025.nt.1 | 91056 | 0.0 | 0.0 | 0.0 | 0.0 | 0.0 | 0.0 |
| DEX0488_025.nt.1 | 91056.1 | 0.0 | 0.0 | 0.0 | 0.0 | 0.0 | 0.0 |
| DEX0488_025.nt.1 | 91171 | 0.0 | 0.0 | 0.0 | 0.0 | 0.0 | 0.0 |
| DEX0488_025.nt.1 | 91171.1 | 0.0 | 0.0 | 0.0 | 0.0 | 0.0 | 0.0 |
| DEX0488_025.nt.1 | 91172 | 0.0 | 0.0 | 0.0 | 0.0 | 0.0 | 0.0 |
| DEX0488_025.nt.1 | 91172.1 | 0.0 | 0.0 | 0.0 | 0.0 | 0.0 | 0.0 |
| DEX0488_025.nt.1 | 91271 | 0.0 | 0.0 | 0.0 | 0.0 | 0.0 | 0.0 |
| DEX0488_025.nt.1 | 91271.1 | 0.0 | 0.0 | 0.0 | 0.0 | 0.0 | 0.0 |
| DEX0488_025.nt.1 | 91272 | 0.0 | 0.0 | 0.0 | 0.0 | 0.0 | 0.0 |
| DEX0488_025.nt.1 | 91272.1 | 0.0 | 0.0 | 0.0 | 0.0 | 0.0 | 0.0 |
| DEX0488_025.nt.1 | 91275 | 0.0 | 0.0 | 0.0 | 0.0 | 0.0 | 0.0 |
| DEX0488_025.nt.1 | 91275.1 | 0.0 | 0.0 | 0.0 | 0.0 | 0.0 | 0.0 |
| DEX0488_025.nt.1 | 91276 | 0.0 | 0.0 | 0.0 | 0.0 | 0.0 | 0.0 |
| DEX0488_025.nt.1 | 91276.1 | 0.0 | 0.0 | 0.0 | 0.0 | 0.0 | 0.0 |
| DEX0488_025.nt.2 | 90528 | 0.0 | 0.0 | 0.0 | 0.0 | 0.0 | 0.0 |
| DEX0488_025.nt.2 | 90528.1 | 0.0 | 0.0 | 0.0 | 0.0 | 0.0 | 0.0 |
| DEX0488_025.nt.2 | 90544 | 0.0 | 0.0 | 0.0 | 0.0 | 0.0 | 0.0 |
| DEX0488_025.nt.2 | 90544.1 | 0.0 | 0.0 | 0.0 | 0.0 | 0.0 | 0.0 |
| DEX0488_025.nt.2 | 91172 | 0.0 | 0.0 | 0.0 | 0.0 | 0.0 | 0.0 |
| DEX0488_025.nt.2 | 91172.1 | 0.0 | 0.0 | 0.0 | 0.0 | 0.0 | 0.0 |
| DEX0488_025.nt.2 | 91272 | 0.0 | 0.0 | 0.0 | 0.0 | 0.0 | 0.0 |
| DEX0488_025.nt.2 | 91272.1 | 0.0 | 0.0 | 0.0 | 0.0 | 0.0 | 0.0 |
| DEX0488_025.nt.2 | 91276 | 0.0 | 0.0 | 0.0 | 0.0 | 0.0 | 0.0 |
| DEX0488_025.nt.2 | 91276.1 | 0.0 | 0.0 | 0.0 | 0.0 | 0.0 | 0.0 |
| DEX0488_026.nt.1 | 24160 | 0.0 | 0.0 | 0.0 | 0.0 | 0.0 | 0.0 |
| DEX0488_026.nt.1 | 24160.1 | 0.0 | 0.0 | 0.0 | 0.0 | 0.0 | 0.0 |
| DEX0488_026.nt.1 | 24160.2 | 0.0 | 0.0 | 0.0 | 0.0 | 0.0 | 0.0 |
| DEX0488_026.nt.1 | 24160.3 | 0.0 | 0.0 | 0.0 | 0.0 | 0.0 | 0.0 |
| DEX0488_026.nt.1 | 26816 | 0.0 | 0.0 | 0.0 | 0.0 | 0.0 | 0.0 |
| DEX0488_026.nt.1 | 26816.1 | 0.0 | 0.0 | 0.0 | 0.0 | 0.0 | 0.0 |
| DEX0488_027.nt.1 | 17852 | 9.1 | 9.5 | 10.0 | 11.1 | 8.3 | 8.3 |
| DEX0488_027.nt.1 | 17852.1 | 9.1 | 9.5 | 10.0 | 11.1 | 8.3 | 8.3 |
| DEX0488_027.nt.1 | 17853 | 9.1 | 10.5 | 10.0 | 12.5 | 8.3 | 9.1 |
| DEX0488_027.nt.1 | 17853.1 | 9.1 | 10.5 | 10.0 | 12.5 | 8.3 | 9.1 |
| DEX0488_027.nt.1 | 18644 | 9.1 | 9.5 | 10.0 | 11.1 | 8.3 | 8.3 |
| DEX0488_027.nt.1 | 18644.1 | 9.1 | 10.0 | 10.0 | 12.5 | 8.3 | 8.3 |
| DEX0488_027.nt.1 | 18644.2 | 9.1 | 10.0 | 10.0 | 12.5 | 8.3 | 8.3 |
| DEX0488_027.nt.1 | 18644.3 | 9.1 | 10.5 | 10.0 | 12.5 | 8.3 | 9.1 |
| DEX0488_027.nt.1 | 18645 | 9.1 | 11.1 | 10.0 | 12.5 | 8.3 | 10.0 |
| DEX0488_027.nt.1 | 18645.1 | 9.1 | 11.1 | 10.0 | 12.5 | 8.3 | 10.0 |
| DEX0488_027.nt.1 | 18645.2 | 9.1 | 11.1 | 10.0 | 12.5 | 8.3 | 10.0 |
| DEX0488_027.nt.1 | 18645.3 | 9.1 | 10.5 | 10.0 | 12.5 | 8.3 | 9.1 |
| DEX0488_027.nt.1 | 41955 | 9.1 | 11.1 | 10.0 | 12.5 | 8.3 | 10.0 |
| DEX0488_027.nt.1 | 41955.1 | 9.1 | 10.5 | 10.0 | 12.5 | 8.3 | 9.1 |
| DEX0488_027.nt.1 | 41955.2 | 9.1 | 12.5 | 10.0 | 14.3 | 8.3 | 11.1 |
| DEX0488_027.nt.1 | 41955.3 | 9.1 | 10.5 | 10.0 | 12.5 | 8.3 | 9.1 |
| DEX0488_027.nt.1 | 41955.4 | 9.1 | 10.0 | 10.0 | 12.5 | 8.3 | 8.3 |
| DEX0488_027.nt.1 | 41956 | 9.1 | 11.1 | 10.0 | 12.5 | 8.3 | 10.0 |
| DEX0488_027.nt.1 | 41956.1 | 4.5 | 7.7 | 0.0 | 0.0 | 8.3 | 12.5 |
| DEX0488_027.nt.1 | 41956.2 | 9.1 | 10.5 | 10.0 | 12.5 | 8.3 | 9.1 |
| DEX0488_027.nt.1 | 41956.3 | 9.1 | 10.5 | 10.0 | 12.5 | 8.3 | 9.1 |
| DEX0488_027.nt.1 | 41956.4 | 9.1 | 10.5 | 10.0 | 12.5 | 8.3 | 9.1 |
| DEX0488_027.nt.2 | 17852 | 9.1 | 9.5 | 10.0 | 11.1 | 8.3 | 8.3 |
| DEX0488_027.nt.2 | 17852.1 | 9.1 | 9.5 | 10.0 | 11.1 | 8.3 | 8.3 |
| DEX0488_027.nt.2 | 17853 | 9.1 | 10.5 | 10.0 | 12.5 | 8.3 | 9.1 |
| DEX0488_027.nt.2 | 17853.1 | 9.1 | 10.5 | 10.0 | 12.5 | 8.3 | 9.1 |
| DEX0488_027.nt.2 | 18644 | 9.1 | 9.5 | 10.0 | 11.1 | 8.3 | 8.3 |
| DEX0488_027.nt.2 | 18644.1 | 9.1 | 10.0 | 10.0 | 12.5 | 8.3 | 8.3 |
| DEX0488_027.nt.2 | 18644.2 | 9.1 | 10.0 | 10.0 | 12.5 | 8.3 | 8.3 |
| DEX0488_027.nt.2 | 18644.3 | 9.1 | 10.5 | 10.0 | 12.5 | 8.3 | 9.1 |
| DEX0488_027.nt.2 | 18645 | 9.1 | 11.1 | 10.0 | 12.5 | 8.3 | 10.0 |
| DEX0488_027.nt.2 | 18645.1 | 9.1 | 11.1 | 10.0 | 12.5 | 8.3 | 10.0 |
| DEX0488_027.nt.2 | 18645.2 | 9.1 | 11.1 | 10.0 | 12.5 | 8.3 | 10.0 |
| DEX0488_027.nt.2 | 18645.3 | 9.1 | 10.5 | 10.0 | 12.5 | 8.3 | 9.1 |
| DEX0488_027.nt.3 | 17852 | 9.1 | 9.5 | 10.0 | 11.1 | 8.3 | 8.3 |
| DEX0488_027.nt.3 | 17852.1 | 9.1 | 9.5 | 10.0 | 11.1 | 8.3 | 8.3 |
| DEX0488_027.nt.3 | 17853 | 9.1 | 10.5 | 10.0 | 12.5 | 8.3 | 9.1 |
| DEX0488_027.nt.3 | 17853.1 | 9.1 | 10.5 | 10.0 | 12.5 | 8.3 | 9.1 |
| DEX0488_027.nt.3 | 18644 | 9.1 | 9.5 | 10.0 | 11.1 | 8.3 | 8.3 |
| DEX0488_027.nt.3 | 18644.1 | 9.1 | 10.0 | 10.0 | 12.5 | 8.3 | 8.3 |
| DEX0488_027.nt.3 | 18644.2 | 9.1 | 10.0 | 10.0 | 12.5 | 8.3 | 8.3 |
| DEX0488_027.nt.3 | 18644.3 | 9.1 | 10.5 | 10.0 | 12.5 | 8.3 | 9.1 |
| DEX0488_027.nt.3 | 18645 | 9.1 | 11.1 | 10.0 | 12.5 | 8.3 | 10.0 |
| DEX0488_027.nt.3 | 18645.1 | 9.1 | 11.1 | 10.0 | 12.5 | 8.3 | 10.0 |
| DEX0488_027.nt.3 | 18645.2 | 9.1 | 11.1 | 10.0 | 12.5 | 8.3 | 10.0 |
| DEX0488_027.nt.3 | 18645.3 | 9.1 | 10.5 | 10.0 | 12.5 | 8.3 | 9.1 |
| DEX0488_027.nt.4 | 17852 | 9.1 | 9.5 | 10.0 | 11.1 | 8.3 | 8.3 |
| DEX0488_027.nt.4 | 17852.1 | 9.1 | 9.5 | 10.0 | 11.1 | 8.3 | 8.3 |
| DEX0488_027.nt.4 | 17853 | 9.1 | 10.5 | 10.0 | 12.5 | 8.3 | 9.1 |
| DEX0488_027.nt.4 | 17853.1 | 9.1 | 10.5 | 10.0 | 12.5 | 8.3 | 9.1 |
| DEX0488_027.nt.4 | 18644 | 9.1 | 9.5 | 10.0 | 11.1 | 8.3 | 8.3 |
| DEX0488_027.nt.4 | 18644.1 | 9.1 | 10.0 | 10.0 | 12.5 | 8.3 | 8.3 |
| DEX0488_027.nt.4 | 18644.2 | 9.1 | 10.0 | 10.0 | 12.5 | 8.3 | 8.3 |
| DEX0488_027.nt.4 | 18644.3 | 9.1 | 10.5 | 10.0 | 12.5 | 8.3 | 9.1 |
| DEX0488_027.nt.4 | 18645 | 9.1 | 11.1 | 10.0 | 12.5 | 8.3 | 10.0 |
| DEX0488_027.nt.4 | 18645.1 | 9.1 | 11.1 | 10.0 | 12.5 | 8.3 | 10.0 |
| DEX0488_027.nt.4 | 18645.2 | 9.1 | 11.1 | 10.0 | 12.5 | 8.3 | 10.0 |
| DEX0488_027.nt.4 | 18645.3 | 9.1 | 10.5 | 10.0 | 12.5 | 8.3 | 9.1 |
| DEX0488_028.nt.1 | 33088 | 31.8 | 31.8 | 20.0 | 20.0 | 41.7 | 41.7 |
| DEX0488_028.nt.1 | 33088.1 | 27.3 | 27.3 | 20.0 | 20.0 | 33.3 | 33.3 |
| DEX0488_028.nt.1 | 33088.2 | 31.8 | 31.8 | 20.0 | 20.0 | 41.7 | 41.7 |
| DEX0488_028.nt.1 | 33088.3 | 27.3 | 27.3 | 10.0 | 10.0 | 41.7 | 41.7 |
| DEX0488_029.nt.1 | 79635 | 36.4 | 36.4 | 40.0 | 40.0 | 33.3 | 33.3 |
| DEX0488_029.nt.1 | 79635.1 | 36.4 | 36.4 | 30.0 | 30.0 | 41.7 | 41.7 |
| DEX0488_030.nt.1 | 35317 | 9.1 | 25.0 | 0.0 | 0.0 | 16.7 | 25.0 |
| DEX0488_030.nt.1 | 35317.1 | 9.1 | 16.7 | 0.0 | 0.0 | 16.7 | 20.0 |
| DEX0488_031.nt.1 | 78587 | 27.3 | 27.3 | 30.0 | 30.0 | 25.0 | 25.0 |
| DEX0488_031.nt.1 | 78587.1 | 27.3 | 27.3 | 30.0 | 30.0 | 25.0 | 25.0 |
| DEX0488_031.nt.1 | 78588 | 31.8 | 31.8 | 40.0 | 40.0 | 25.0 | 25.0 |
| DEX0488_031.nt.1 | 78588.1 | 36.4 | 36.4 | 50.0 | 50.0 | 25.0 | 25.0 |
| DEX0488_032.nt.1 | 78711 | 27.3 | 27.3 | 20.0 | 20.0 | 33.3 | 33.3 |
| DEX0488_032.nt.1 | 78711.1 | 22.7 | 22.7 | 10.0 | 10.0 | 33.3 | 33.3 |
| DEX0488_032.nt.1 | 78712 | 27.3 | 27.3 | 20.0 | 20.0 | 33.3 | 33.3 |
| DEX0488_032.nt.1 | 78712.1 | 27.3 | 27.3 | 20.0 | 20.0 | 33.3 | 33.3 |
| DEX0488_033.nt.1 | 79019 | 18.2 | 19.0 | 30.0 | 33.3 | 8.3 | 8.3 |
| DEX0488_033.nt.1 | 79019.1 | 18.2 | 18.2 | 30.0 | 30.0 | 8.3 | 8.3 |
| DEX0488_033.nt.1 | 79020 | 18.2 | 18.2 | 30.0 | 30.0 | 8.3 | 8.3 |
| DEX0488_033.nt.1 | 79020.1 | 13.6 | 14.3 | 20.0 | 20.0 | 8.3 | 9.1 |
| DEX0488_033.nt.2 | 79019 | 18.2 | 19.0 | 30.0 | 33.3 | 8.3 | 8.3 |
| DEX0488_033.nt.2 | 79019.1 | 18.2 | 18.2 | 30.0 | 30.0 | 8.3 | 8.3 |
| DEX0488_033.nt.2 | 79020 | 18.2 | 18.2 | 30.0 | 30.0 | 8.3 | 8.3 |
| DEX0488_033.nt.2 | 79020.1 | 13.6 | 14.3 | 20.0 | 20.0 | 8.3 | 9.1 |
| DEX0488_034.nt.1 | 90123 | 13.6 | 75.0 | 10.0 | 100.0 | 16.7 | 66.7 |
| DEX0488_034.nt.1 | 90123.1 | 13.6 | 75.0 | 10.0 | 100.0 | 16.7 | 66.7 |
| DEX0488_034.nt.1 | 90124 | 13.6 | 60.0 | 10.0 | 100.0 | 16.7 | 50.0 |
| DEX0488_034.nt.1 | 90124.1 | 13.6 | 60.0 | 10.0 | 100.0 | 16.7 | 50.0 |
| DEX0488_035.nt.1 | 79903 | 9.1 | 9.1 | 20.0 | 20.0 | 0.0 | 0.0 |
| DEX0488_035.nt.1 | 79903.1 | 4.5 | 4.8 | 10.0 | 11.1 | 0.0 | 0.0 |
| DEX0488_035.nt.1 | 79904 | 4.5 | 4.5 | 10.0 | 10.0 | 0.0 | 0.0 |
| DEX0488_035.nt.1 | 79904.1 | 4.5 | 5.0 | 10.0 | 10.0 | 0.0 | 0.0 |
| DEX0488_035.nt.2 | 79903 | 9.1 | 9.1 | 20.0 | 20.0 | 0.0 | 0.0 |
| DEX0488_035.nt.2 | 79903.1 | 4.5 | 4.8 | 10.0 | 11.1 | 0.0 | 0.0 |
| DEX0488_035.nt.2 | 79904 | 4.5 | 4.5 | 10.0 | 10.0 | 0.0 | 0.0 |
| DEX0488_035.nt.2 | 79904.1 | 4.5 | 5.0 | 10.0 | 10.0 | 0.0 | 0.0 |
| DEX0488_036.nt.1 | 3976 | 0.0 | 0.0 | 0.0 | 0.0 | 0.0 | 0.0 |
| DEX0488_036.nt.1 | 3976.1 | 0.0 | 0.0 | 0.0 | 0.0 | 0.0 | 0.0 |
| DEX0488_036.nt.1 | 3977 | 0.0 | 0.0 | 0.0 | 0.0 | 0.0 | 0.0 |
| DEX0488_036.nt.1 | 3977.1 | 0.0 | 0.0 | 0.0 | 0.0 | 0.0 | 0.0 |
| DEX0488_036.nt.2 | 3976 | 0.0 | 0.0 | 0.0 | 0.0 | 0.0 | 0.0 |
| DEX0488_036.nt.2 | 3976.1 | 0.0 | 0.0 | 0.0 | 0.0 | 0.0 | 0.0 |
| DEX0488_036.nt.2 | 3977 | 0.0 | 0.0 | 0.0 | 0.0 | 0.0 | 0.0 |
| DEX0488_036.nt.2 | 3977.1 | 0.0 | 0.0 | 0.0 | 0.0 | 0.0 | 0.0 |

[0519] Prostate Cancer

[0520] For prostate cancer three different chip designs were evaluated with overlapping sets of a total of 29 samples, comparing the expression patterns of prostate cancer or benign disease derived total RNA to total RNA isolated from a pool of 35 normal prostate tissues. For the Prostate1 Array and Prostate2 Array Chips all 29 samples (17 prostate cancer samples, 12 non-malignant disease samples) were analyzed. For the Multi-Cancer Array Chip a subset of 28 of these samples (16 prostate cancer samples, 12 non-malignant disease samples) were analyzed.

[0521] No results for the statistically significant up-regulated genes on the Prostate1 Array Chip and the Prostate2 Array Chip are shown. The results for the statistically significant up-regulated genes on the Multi-Cancer Array Chip are shown in Table(s) 24. The first two columns of each table contain information about the sequence itself (DEX ID, Oligo Name), the next columns show the results obtained for prostate cancer samples (“CAN”) or non-malignant disease samples (“DIS”). ‘% up’ indicates the percentage of all experiments in which up-regulation of at least 2-fold was observed (n=29 for the Prostate2 Array Chip and the Multi-Cancer Array Chip), ‘% valid up’ indicates the percentage of experiments with valid expression values in which up-regulation of at least 2-fold was observed.

TABLE 24

| | | Pro | | Pro | Pro |
|---|---|---|---|---|---|
| | | Multi- | Pro Multi- | Multi- | Multi- |
| | | cancer | cancer | cancer | cancer |
| | | CAN | CAN | DIS | DIS % |
| | Oligo | % up | % valid up | % up | valid up |
| DEX ID | Name | n = 17 | n = 17 | n = 12 | n = 12 |
| DEX0488_001.nt.1 | 79931 | 0.0 | 0.0 | 0.0 | 0.0 |
| DEX0488_001.nt.1 | 79931.1 | 0.0 | 0.0 | 0.0 | 0.0 |
| DEX0488_001.nt.1 | 79932 | 0.0 | 0.0 | 0.0 | 0.0 |
| DEX0488_001.nt.1 | 79932.1 | 0.0 | 0.0 | 0.0 | 0.0 |
| DEX0488_001.nt.10 | 79931 | 0.0 | 0.0 | 0.0 | 0.0 |
| DEX0488_001.nt.10 | 79931.1 | 0.0 | 0.0 | 0.0 | 0.0 |
| DEX0488_001.nt.10 | 79932 | 0.0 | 0.0 | 0.0 | 0.0 |
| DEX0488_001.nt.10 | 79932.1 | 0.0 | 0.0 | 0.0 | 0.0 |
| DEX0488_001.nt.11 | 79931 | 0.0 | 0.0 | 0.0 | 0.0 |
| DEX0488_001.nt.11 | 79931.1 | 0.0 | 0.0 | 0.0 | 0.0 |
| DEX0488_001.nt.11 | 79932 | 0.0 | 0.0 | 0.0 | 0.0 |
| DEX0488_001.nt.11 | 79932.1 | 0.0 | 0.0 | 0.0 | 0.0 |
| DEX0488_001.nt.2 | 79931 | 0.0 | 0.0 | 0.0 | 0.0 |
| DEX0488_001.nt.2 | 79931.1 | 0.0 | 0.0 | 0.0 | 0.0 |
| DEX0488_001.nt.2 | 79932 | 0.0 | 0.0 | 0.0 | 0.0 |
| DEX0488_001.nt.2 | 79932.1 | 0.0 | 0.0 | 0.0 | 0.0 |
| DEX0488_001.nt.3 | 79931 | 0.0 | 0.0 | 0.0 | 0.0 |
| DEX0488_001.nt.3 | 79931.1 | 0.0 | 0.0 | 0.0 | 0.0 |
| DEX0488_001.nt.3 | 79932 | 0.0 | 0.0 | 0.0 | 0.0 |
| DEX0488_001.nt.3 | 79932.1 | 0.0 | 0.0 | 0.0 | 0.0 |
| DEX0488_001.nt.4 | 79931 | 0.0 | 0.0 | 0.0 | 0.0 |
| DEX0488_001.nt.4 | 79931.1 | 0.0 | 0.0 | 0.0 | 0.0 |
| DEX0488_001.nt.4 | 79932 | 0.0 | 0.0 | 0.0 | 0.0 |
| DEX0488_001.nt.4 | 79932.1 | 0.0 | 0.0 | 0.0 | 0.0 |
| DEX0488_001.nt.5 | 79931 | 0.0 | 0.0 | 0.0 | 0.0 |
| DEX0488_001.nt.5 | 79931.1 | 0.0 | 0.0 | 0.0 | 0.0 |
| DEX0488_001.nt.5 | 79932 | 0.0 | 0.0 | 0.0 | 0.0 |
| DEX0488_001.nt.5 | 79932.1 | 0.0 | 0.0 | 0.0 | 0.0 |
| DEX0488_001.nt.6 | 79931 | 0.0 | 0.0 | 0.0 | 0.0 |
| DEX0488_001.nt.6 | 79931.1 | 0.0 | 0.0 | 0.0 | 0.0 |
| DEX0488_001.nt.6 | 79932 | 0.0 | 0.0 | 0.0 | 0.0 |
| DEX0488_001.nt.6 | 79932.1 | 0.0 | 0.0 | 0.0 | 0.0 |
| DEX0488_001.nt.7 | 79931 | 0.0 | 0.0 | 0.0 | 0.0 |
| DEX0488_001.nt.7 | 79931.1 | 0.0 | 0.0 | 0.0 | 0.0 |
| DEX0488_001.nt.7 | 79932 | 0.0 | 0.0 | 0.0 | 0.0 |
| DEX0488_001.nt.7 | 79932.1 | 0.0 | 0.0 | 0.0 | 0.0 |
| DEX0488_001.nt.8 | 79931 | 0.0 | 0.0 | 0.0 | 0.0 |
| DEX0488_001.nt.8 | 79931.1 | 0.0 | 0.0 | 0.0 | 0.0 |
| DEX0488_001.nt.8 | 79932 | 0.0 | 0.0 | 0.0 | 0.0 |
| DEX0488_001.nt.8 | 79932.1 | 0.0 | 0.0 | 0.0 | 0.0 |
| DEX0488_001.nt.9 | 79931 | 0.0 | 0.0 | 0.0 | 0.0 |
| DEX0488_001.nt.9 | 79931.1 | 0.0 | 0.0 | 0.0 | 0.0 |
| DEX0488_001.nt.9 | 79932 | 0.0 | 0.0 | 0.0 | 0.0 |
| DEX0488_001.nt.9 | 79932.1 | 0.0 | 0.0 | 0.0 | 0.0 |
| DEX0488_002.nt.1 | 91111 | 0.0 | 0.0 | 0.0 | 0.0 |
| DEX0488_002.nt.1 | 91111.1 | 0.0 | 0.0 | 0.0 | 0.0 |
| DEX0488_002.nt.1 | 91112 | 0.0 | 0.0 | 0.0 | 0.0 |
| DEX0488_002.nt.1 | 91112.1 | 0.0 | 0.0 | 0.0 | 0.0 |
| DEX0488_003.nt.1 | 27921 | 35.3 | 37.5 | 8.3 | 8.3 |
| DEX0488_003.nt.1 | 27921.1 | 35.3 | 37.5 | 8.3 | 8.3 |
| DEX0488_003.nt.1 | 27922 | 29.4 | 31.2 | 8.3 | 8.3 |
| DEX0488_003.nt.1 | 27922.1 | 35.3 | 37.5 | 8.3 | 8.3 |
| DEX0488_003.nt.1 | 78855 | 35.3 | 40.0 | 8.3 | 8.3 |
| DEX0488_003.nt.1 | 78855.1 | 29.4 | 33.3 | 8.3 | 8.3 |
| DEX0488_003.nt.1 | 78856 | 29.4 | 33.3 | 8.3 | 8.3 |
| DEX0488_003.nt.1 | 78856.1 | 35.3 | 40.0 | 8.3 | 8.3 |
| DEX0488_003.nt.2 | 27921 | 35.3 | 37.5 | 8.3 | 8.3 |
| DEX0488_003.nt.2 | 27921.1 | 35.3 | 37.5 | 8.3 | 8.3 |
| DEX0488_003.nt.2 | 27922 | 29.4 | 31.2 | 8.3 | 8.3 |
| DEX0488_003.nt.2 | 27922.1 | 35.3 | 37.5 | 8.3 | 8.3 |
| DEX0488_003.nt.2 | 78855 | 35.3 | 40.0 | 8.3 | 8.3 |
| DEX0488_003.nt.2 | 78855.1 | 29.4 | 33.3 | 8.3 | 8.3 |
| DEX0488_003.nt.2 | 78856 | 29.4 | 33.3 | 8.3 | 8.3 |
| DEX0488_003.nt.2 | 78856.1 | 35.3 | 40.0 | 8.3 | 8.3 |
| DEX0488_003.nt.3 | 27921 | 35.3 | 37.5 | 8.3 | 8.3 |
| DEX0488_003.nt.3 | 27921.1 | 35.3 | 37.5 | 8.3 | 8.3 |
| DEX0488_003.nt.3 | 27922 | 29.4 | 31.2 | 8.3 | 8.3 |
| DEX0488_003.nt.3 | 27922.1 | 35.3 | 37.5 | 8.3 | 8.3 |
| DEX0488_003.nt.3 | 78855 | 35.3 | 40.0 | 8.3 | 8.3 |
| DEX0488_003.nt.3 | 78855.1 | 29.4 | 33.3 | 8.3 | 8.3 |
| DEX0488_003.nt.3 | 78856 | 29.4 | 33.3 | 8.3 | 8.3 |
| DEX0488_003.nt.3 | 78856.1 | 35.3 | 40.0 | 8.3 | 8.3 |
| DEX0488_003.nt.4 | 27921 | 35.3 | 37.5 | 8.3 | 8.3 |
| DEX0488_003.nt.4 | 27921.1 | 35.3 | 37.5 | 8.3 | 8.3 |
| DEX0488_003.nt.4 | 27922 | 29.4 | 31.2 | 8.3 | 8.3 |
| DEX0488_003.nt.4 | 27922.1 | 35.3 | 37.5 | 8.3 | 8.3 |
| DEX0488_003.nt.4 | 78855 | 35.3 | 40.0 | 8.3 | 8.3 |
| DEX0488_003.nt.4 | 78855.1 | 29.4 | 33.3 | 8.3 | 8.3 |
| DEX0488_003.nt.4 | 78856 | 29.4 | 33.3 | 8.3 | 8.3 |
| DEX0488_003.nt.4 | 78856.1 | 35.3 | 40.0 | 8.3 | 8.3 |
| DEX0488_003.nt.5 | 27921 | 35.3 | 37.5 | 8.3 | 8.3 |
| DEX0488_003.nt.5 | 27921.1 | 35.3 | 37.5 | 8.3 | 8.3 |
| DEX0488_003.nt.5 | 27922 | 29.4 | 31.2 | 8.3 | 8.3 |
| DEX0488_003.nt.5 | 27922.1 | 35.3 | 37.5 | 8.3 | 8.3 |
| DEX0488_003.nt.5 | 78855 | 35.3 | 40.0 | 8.3 | 8.3 |
| DEX0488_003.nt.5 | 78855.1 | 29.4 | 33.3 | 8.3 | 8.3 |
| DEX0488_003.nt.5 | 78856 | 29.4 | 33.3 | 8.3 | 8.3 |
| DEX0488_003.nt.5 | 78856.1 | 35.3 | 40.0 | 8.3 | 8.3 |
| DEX0488_003.nt.6 | 27921 | 35.3 | 37.5 | 8.3 | 8.3 |
| DEX0488_003.nt.6 | 27921.1 | 35.3 | 37.5 | 8.3 | 8.3 |
| DEX0488_003.nt.6 | 27922 | 29.4 | 31.2 | 8.3 | 8.3 |
| DEX0488_003.nt.6 | 27922.1 | 35.3 | 37.5 | 8.3 | 8.3 |
| DEX0488_003.nt.6 | 78855 | 35.3 | 40.0 | 8.3 | 8.3 |
| DEX0488_003.nt.6 | 78855.1 | 29.4 | 33.3 | 8.3 | 8.3 |
| DEX0488_003.nt.6 | 78856 | 29.4 | 33.3 | 8.3 | 8.3 |
| DEX0488_003.nt.6 | 78856.1 | 35.3 | 40.0 | 8.3 | 8.3 |
| DEX0488_003.nt.7 | 78855 | 35.3 | 40.0 | 8.3 | 8.3 |
| DEX0488_003.nt.7 | 78855.1 | 29.4 | 33.3 | 8.3 | 8.3 |
| DEX0488_003.nt.7 | 78856 | 29.4 | 33.3 | 8.3 | 8.3 |
| DEX0488_003.nt.7 | 78856.1 | 35.3 | 40.0 | 8.3 | 8.3 |
| DEX0488_004.nt.1 | 10666 | 0.0 | 0.0 | 0.0 | 0.0 |
| DEX0488_004.nt.1 | 10666.1 | 0.0 | 0.0 | 0.0 | 0.0 |
| DEX0488_004.nt.1 | 10667 | 11.8 | 15.4 | 0.0 | 0.0 |
| DEX0488_004.nt.1 | 10667.1 | 11.8 | 13.3 | 0.0 | 0.0 |
| DEX0488_005.nt.1 | 9744 | 0.0 | 0.0 | 0.0 | 0.0 |
| DEX0488_005.nt.1 | 9744.1 | 0.0 | 0.0 | 8.3 | 11.1 |
| DEX0488_005.nt.1 | 9745 | 0.0 | 0.0 | 8.3 | 10.0 |
| DEX0488_005.nt.1 | 9745.1 | 0.0 | 0.0 | 8.3 | 11.1 |
| DEX0488_006.nt.1 | 4353 | 0.0 | 0.0 | 25.0 | 25.0 |
| DEX0488_006.nt.1 | 4353.1 | 0.0 | 0.0 | 25.0 | 25.0 |
| DEX0488_006.nt.1 | 5804 | 5.9 | 6.2 | 16.7 | 16.7 |
| DEX0488_006.nt.1 | 5804.1 | 5.9 | 6.2 | 25.0 | 25.0 |
| DEX0488_006.nt.1 | 5804.2 | 0.0 | 0.0 | 25.0 | 25.0 |
| DEX0488_006.nt.1 | 92287 | 5.9 | 6.2 | 25.0 | 25.0 |
| DEX0488_006.nt.1 | 92287.1 | 5.9 | 6.2 | 25.0 | 25.0 |
| DEX0488_007.nt.1 | 41955 | 17.6 | 23.1 | 0.0 | 0.0 |
| DEX0488_007.nt.1 | 41955.1 | 17.6 | 25.0 | 0.0 | 0.0 |
| DEX0488_007.nt.1 | 41955.2 | 17.6 | 21.4 | 8.3 | 50.0 |
| DEX0488_007.nt.1 | 41955.3 | 17.6 | 23.1 | 8.3 | 33.3 |
| DEX0488_007.nt.1 | 41955.4 | 17.6 | 21.4 | 8.3 | 20.0 |
| DEX0488_007.nt.1 | 41956 | 17.6 | 25.0 | 0.0 | 0.0 |
| DEX0488_007.nt.1 | 41956.1 | 11.8 | 22.2 | 0.0 | 0.0 |
| DEX0488_007.nt.1 | 41956.2 | 17.6 | 23.1 | 8.3 | 33.3 |
| DEX0488_007.nt.1 | 41956.3 | 17.6 | 25.0 | 0.0 | 0.0 |
| DEX0488_007.nt.1 | 41956.4 | 17.6 | 21.4 | 0.0 | 0.0 |
| DEX0488_008.nt.1 | 17292 | 29.4 | 31.2 | 16.7 | 16.7 |
| DEX0488_008.nt.1 | 17292.1 | 29.4 | 31.2 | 16.7 | 16.7 |
| DEX0488_008.nt.1 | 17293 | 29.4 | 31.2 | 16.7 | 16.7 |
| DEX0488_008.nt.1 | 17293.1 | 29.4 | 31.2 | 16.7 | 16.7 |
| DEX0488_008.nt.1 | 2085 | 29.4 | 31.2 | 16.7 | 16.7 |
| DEX0488_008.nt.1 | 24404 | 29.4 | 31.2 | 16.7 | 16.7 |
| DEX0488_008.nt.1 | 24404.1 | 29.4 | 31.2 | 16.7 | 16.7 |
| DEX0488_008.nt.1 | 24405 | 29.4 | 38.5 | 16.7 | 20.0 |
| DEX0488_008.nt.1 | 24405.1 | 29.4 | 31.2 | 16.7 | 16.7 |
| DEX0488_008.nt.1 | 4909 | 29.4 | 31.2 | 16.7 | 16.7 |
| DEX0488_008.nt.1 | 4909.1 | 29.4 | 31.2 | 16.7 | 16.7 |
| DEX0488_008.nt.1 | 4910 | 23.5 | 25.0 | 16.7 | 16.7 |
| DEX0488_008.nt.1 | 4910.1 | 29.4 | 31.2 | 16.7 | 16.7 |
| DEX0488_008.nt.2 | 17292 | 29.4 | 31.2 | 16.7 | 16.7 |
| DEX0488_008.nt.2 | 17292.1 | 29.4 | 31.2 | 16.7 | 16.7 |
| DEX0488_008.nt.2 | 17293 | 29.4 | 31.2 | 16.7 | 16.7 |
| DEX0488_008.nt.2 | 17293.1 | 29.4 | 31.2 | 16.7 | 16.7 |
| DEX0488_008.nt.2 | 2085 | 29.4 | 31.2 | 16.7 | 16.7 |
| DEX0488_008.nt.2 | 24404 | 29.4 | 31.2 | 16.7 | 16.7 |
| DEX0488_008.nt.2 | 24404.1 | 29.4 | 31.2 | 16.7 | 16.7 |
| DEX0488_008.nt.2 | 24405 | 29.4 | 38.5 | 16.7 | 20.0 |
| DEX0488_008.nt.2 | 24405.1 | 29.4 | 31.2 | 16.7 | 16.7 |
| DEX0488_008.nt.2 | 4909 | 29.4 | 31.2 | 16.7 | 16.7 |
| DEX0488_008.nt.2 | 4909.1 | 29.4 | 31.2 | 16.7 | 16.7 |
| DEX0488_008.nt.2 | 4910 | 23.5 | 25.0 | 16.7 | 16.7 |
| DEX0488_008.nt.2 | 4910.1 | 29.4 | 31.2 | 16.7 | 16.7 |
| DEX0488_009.nt.1 | 79339 | 0.0 | 0.0 | 0.0 | 0.0 |
| DEX0488_009.nt.1 | 79339.1 | 0.0 | 0.0 | 0.0 | 0.0 |
| DEX0488_010.nt.1 | 26770 | 17.6 | 18.8 | 8.3 | 9.1 |
| DEX0488_010.nt.1 | 26770.1 | 17.6 | 18.8 | 8.3 | 9.1 |
| DEX0488_011.nt.1 | 33840 | 5.9 | 6.7 | 0.0 | 0.0 |
| DEX0488_011.nt.1 | 33840.1 | 0.0 | 0.0 | 0.0 | 0.0 |
| DEX0488_011.nt.1 | 33841 | 5.9 | 7.7 | 0.0 | 0.0 |
| DEX0488_011.nt.1 | 33841.1 | 5.9 | 8.3 | 0.0 | 0.0 |
| DEX0488_011.nt.1 | 39927 | 0.0 | 0.0 | 0.0 | 0.0 |
| DEX0488_011.nt.1 | 39927.1 | 0.0 | 0.0 | 0.0 | 0.0 |
| DEX0488_011.nt.1 | 39927.2 | 0.0 | 0.0 | 0.0 | 0.0 |
| DEX0488_011.nt.1 | 39927.3 | 5.9 | 6.7 | 0.0 | 0.0 |
| DEX0488_011.nt.1 | 39927.4 | 0.0 | 0.0 | 0.0 | 0.0 |
| DEX0488_011.nt.1 | 39928 | 0.0 | 0.0 | 0.0 | 0.0 |
| DEX0488_011.nt.1 | 39928.1 | 5.9 | 7.1 | 0.0 | 0.0 |
| DEX0488_011.nt.1 | 39928.2 | 5.9 | 7.7 | 0.0 | 0.0 |
| DEX0488_011.nt.1 | 39928.3 | 5.9 | 8.3 | 0.0 | 0.0 |
| DEX0488_011.nt.1 | 39928.4 | 5.9 | 7.7 | 0.0 | 0.0 |
| DEX0488_012.nt.1 | 21187 | 0.0 | 0.0 | 0.0 | 0.0 |
| DEX0488_012.nt.1 | 21187.1 | 0.0 | 0.0 | 0.0 | 0.0 |
| DEX0488_012.nt.1 | 21188 | 0.0 | 0.0 | 0.0 | 0.0 |
| DEX0488_012.nt.1 | 21188.1 | 0.0 | 0.0 | 0.0 | 0.0 |
| DEX0488_022.nt.1 | 78927 | 0.0 | 0.0 | 0.0 | 0.0 |
| DEX0488_012.nt.1 | 78927.1 | 0.0 | 0.0 | 0.0 | 0.0 |
| DEX0488_013.nt.1 | 79955 | 0.0 | 0.0 | 0.0 | 0.0 |
| DEX0488_013.nt.1 | 79955.1 | 0.0 | 0.0 | 8.3 | 8.3 |
| DEX0488_013.nt.1 | 79956 | 0.0 | 0.0 | 0.0 | 0.0 |
| DEX0488_013.nt.1 | 79956.1 | 0.0 | 0.0 | 0.0 | 0.0 |
| DEX0488_013.nt.1 | 79959 | 0.0 | 0.0 | 0.0 | 0.0 |
| DEX0488_013.nt.1 | 79959.1 | 0.0 | 0.0 | 0.0 | 0.0 |
| DEX0488_013.nt.1 | 79960 | 0.0 | 0.0 | 0.0 | 0.0 |
| DEX0488_013.nt.1 | 79960.1 | 0.0 | 0.0 | 0.0 | 0.0 |
| DEX0488_013.nt.1 | 79963 | 0.0 | 0.0 | 0.0 | 0.0 |
| DEX0488_013.nt.1 | 79963.1 | 0.0 | 0.0 | 0.0 | 0.0 |
| DEX0488_013.nt.1 | 79964 | 0.0 | 0.0 | 0.0 | 0.0 |
| DEX0488_013.nt.1 | 79964.1 | 0.0 | 0.0 | 0.0 | 0.0 |
| DEX0488_013.nt.2 | 79959 | 0.0 | 0.0 | 0.0 | 0.0 |
| DEX0488_013.nt.2 | 79959.1 | 0.0 | 0.0 | 0.0 | 0.0 |
| DEX0488_013.nt.2 | 79960 | 0.0 | 0.0 | 0.0 | 0.0 |
| DEX0488_013.nt.2 | 79960.1 | 0.0 | 0.0 | 0.0 | 0.0 |
| DEX0488_014.nt.1 | 90171 | 0.0 | 0.0 | 0.0 | 0.0 |
| DEX0488_014.nt.1 | 90171.1 | 0.0 | 0.0 | 0.0 | 0.0 |
| DEX0488_014.nt.1 | 90172 | 0.0 | 0.0 | 0.0 | 0.0 |
| DEX0488_014.nt.1 | 90172.1 | 0.0 | 0.0 | 0.0 | 0.0 |
| DEX0488_014.nt.2 | 90171 | 0.0 | 0.0 | 0.0 | 0.0 |
| DEX0488_014.nt.2 | 90171.1 | 0.0 | 0.0 | 0.0 | 0.0 |
| DEX0488_014.nt.2 | 90172 | 0.0 | 0.0 | 0.0 | 0.0 |
| DEX0488_014.nt.2 | 90172.1 | 0.0 | 0.0 | 0.0 | 0.0 |
| DEX0488_014.nt.3 | 90171 | 0.0 | 0.0 | 0.0 | 0.0 |
| DEX0488_014.nt.3 | 90171.1 | 0.0 | 0.0 | 0.0 | 0.0 |
| DEX0488_014.nt.3 | 90172 | 0.0 | 0.0 | 0.0 | 0.0 |
| DEX0488_014.nt.3 | 90172.1 | 0.0 | 0.0 | 0.0 | 0.0 |
| DEX0488_014.nt.4 | 90171 | 0.0 | 0.0 | 0.0 | 0.0 |
| DEX0488_014.nt.4 | 90171.1 | 0.0 | 0.0 | 0.0 | 0.0 |
| DEX0488_014.nt.4 | 90172 | 0.0 | 0.0 | 0.0 | 0.0 |
| DEX0488_014.nt.4 | 90172.1 | 0.0 | 0.0 | 0.0 | 0.0 |
| DEX0488_015.nt.1 | 78631 | 11.8 | 14.3 | 8.3 | 16.7 |
| DEX0488_015.nt.1 | 78631.1 | 23.5 | 26.7 | 8.3 | 16.7 |
| DEX0488_015.nt.1 | 78632 | 11.8 | 12.5 | 8.3 | 10.0 |
| DEX0488_015.nt.1 | 78632.1 | 11.8 | 12.5 | 0.0 | 0.0 |
| DEX0488_015.nt.2 | 78631 | 11.8 | 14.3 | 8.3 | 16.7 |
| DEX0488_015.nt.2 | 78631.1 | 23.5 | 26.7 | 8.3 | 16.7 |
| DEX0488_015.nt.2 | 78632 | 11.8 | 12.5 | 8.3 | 10.0 |
| DEX0488_015.nt.2 | 78632.1 | 11.8 | 12.5 | 0.0 | 0.0 |
| DEX0488_016.nt.1 | 79660 | 0.0 | 0.0 | 8.3 | 25.0 |
| DEX0488_016.nt.1 | 79660.1 | 0.0 | 0.0 | 8.3 | 14.3 |
| DEX0488_016.nt.10 | 79659 | 0.0 | 0.0 | 0.0 | 0.0 |
| DEX0488_016.nt.10 | 79659.1 | 0.0 | 0.0 | 0.0 | 0.0 |
| DEX0488_016.nt.10 | 79660 | 0.0 | 0.0 | 8.3 | 25.0 |
| DEX0488_016.nt.10 | 79660.1 | 0.0 | 0.0 | 8.3 | 14.3 |
| DEX0488_016.nt.11 | 79659 | 0.0 | 0.0 | 0.0 | 0.0 |
| DEX0488_016.nt.11 | 79659.1 | 0.0 | 0.0 | 0.0 | 0.0 |
| DEX0488_016.nt.11 | 79660 | 0.0 | 0.0 | 8.3 | 25.0 |
| DEX0488_016.nt.11 | 79660.1 | 0.0 | 0.0 | 8.3 | 14.3 |
| DEX0488_016.nt.2 | 79660 | 0.0 | 0.0 | 8.3 | 25.0 |
| DEX0488_016.nt.2 | 79660.1 | 0.0 | 0.0 | 8.3 | 14.3 |
| DEX0488_016.nt.3 | 79660 | 0.0 | 0.0 | 8.3 | 25.0 |
| DEX0488_016.nt.3 | 79660.1 | 0.0 | 0.0 | 8.3 | 14.3 |
| DEX0488_016.nt.4 | 79660 | 0.0 | 0.0 | 8.3 | 25.0 |
| DEX0488_016.nt.4 | 79660.1 | 0.0 | 0.0 | 8.3 | 14.3 |
| DEX0488_016.nt.5 | 79660 | 0.0 | 0.0 | 8.3 | 25.0 |
| DEX0488_016.nt.5 | 79660.1 | 0.0 | 0.0 | 8.3 | 14.3 |
| DEX0488_016.nt.6 | 79660 | 0.0 | 0.0 | 8.3 | 25.0 |
| DEX0488_016.nt.6 | 79660.1 | 0.0 | 0.0 | 8.3 | 14.3 |
| DEX0488_016.nt.7 | 79660 | 0.0 | 0.0 | 8.3 | 25.0 |
| DEX0488_016.nt.7 | 79660.1 | 0.0 | 0.0 | 8.3 | 14.3 |
| DEX0488_016.nt.8 | 79660 | 0.0 | 0.0 | 8.3 | 25.0 |
| DEX0488_016.nt.8 | 79660.1 | 0.0 | 0.0 | 8.3 | 14.3 |
| DEX0488_016.nt.9 | 79660 | 0.0 | 0.0 | 8.3 | 25.0 |
| DEX0488_016.nt.9 | 79660.1 | 0.0 | 0.0 | 8.3 | 14.3 |
| DEX0488_017.nt.1 | 4353 | 0.0 | 0.0 | 25.0 | 25.0 |
| DEX0488_017.nt.1 | 4353.1 | 0.0 | 0.0 | 25.0 | 25.0 |
| DEX0488_017.nt.1 | 5804 | 5.9 | 6.2 | 16.7 | 16.7 |
| DEX0488_017.nt.1 | 5804.1 | 5.9 | 6.2 | 25.0 | 25.0 |
| DEX0488_017.nt.1 | 5804.2 | 0.0 | 0.0 | 25.0 | 25.0 |
| DEX0488_017.nt.1 | 92287 | 5.9 | 6.2 | 25.0 | 25.0 |
| DEX0488_017.nt.1 | 92287.1 | 5.9 | 6.2 | 25.0 | 25.0 |
| DEX0488_018.nt.1 | 79936 | 0.0 | 0.0 | 0.0 | 0.0 |
| DEX0488_018.nt.1 | 79936.1 | 0.0 | 0.0 | 0.0 | 0.0 |
| DEX0488_018.nt.1 | 79944 | 0.0 | 0.0 | 0.0 | 0.0 |
| DEX0488_018.nt.1 | 79944.1 | 0.0 | 0.0 | 0.0 | 0.0 |
| DEX0488_018.nt.2 | 79936 | 0.0 | 0.0 | 0.0 | 0.0 |
| DEX0488_018.nt.2 | 79936.1 | 0.0 | 0.0 | 0.0 | 0.0 |
| DEX0488_018.nt.2 | 79944 | 0.0 | 0.0 | 0.0 | 0.0 |
| DEX0488_018.nt.2 | 79944.1 | 0.0 | 0.0 | 0.0 | 0.0 |
| DEX0488_018.nt.3 | 79936 | 0.0 | 0.0 | 0.0 | 0.0 |
| DEX0488_018.nt.3 | 79936.1 | 0.0 | 0.0 | 0.0 | 0.0 |
| DEX0488_018.nt.3 | 79944 | 0.0 | 0.0 | 0.0 | 0.0 |
| DEX0488_018.nt.3 | 79944.1 | 0.0 | 0.0 | 0.0 | 0.0 |
| DEX0488_018.nt.4 | 79936 | 0.0 | 0.0 | 0.0 | 0.0 |
| DEX0488_018.nt.4 | 79936.1 | 0.0 | 0.0 | 0.0 | 0.0 |
| DEX0488_018.nt.4 | 79944 | 0.0 | 0.0 | 0.0 | 0.0 |
| DEX0488_018.nt.4 | 79944.1 | 0.0 | 0.0 | 0.0 | 0.0 |
| DEX0488_018.nt.5 | 79936 | 0.0 | 0.0 | 0.0 | 0.0 |
| DEX0488_018.nt.5 | 79936.1 | 0.0 | 0.0 | 0.0 | 0.0 |
| DEX0488_018.nt.5 | 79944 | 0.0 | 0.0 | 0.0 | 0.0 |
| DEX0488_018.nt.5 | 79944.1 | 0.0 | 0.0 | 0.0 | 0.0 |
| DEX0488_018.nt.6 | 79936 | 0.0 | 0.0 | 0.0 | 0.0 |
| DEX0488_018.nt.6 | 79936.1 | 0.0 | 0.0 | 0.0 | 0.0 |
| DEX0488_018.nt.6 | 79944 | 0.0 | 0.0 | 0.0 | 0.0 |
| DEX0488_018.nt.6 | 79944.1 | 0.0 | 0.0 | 0.0 | 0.0 |
| DEX0488_018.nt.7 | 79936 | 0.0 | 0.0 | 0.0 | 0.0 |
| DEX0488_018.nt.7 | 79936.1 | 0.0 | 0.0 | 0.0 | 0.0 |
| DEX0488_018.nt.7 | 79944 | 0.0 | 0.0 | 0.0 | 0.0 |
| DEX0488_018.nt.7 | 79944.1 | 0.0 | 0.0 | 0.0 | 0.0 |
| DEX0488_018.nt.8 | 79936 | 0.0 | 0.0 | 0.0 | 0.0 |
| DEX0488_018.nt.8 | 79936.1 | 0.0 | 0.0 | 0.0 | 0.0 |
| DEX0488_018.nt.8 | 79944 | 0.0 | 0.0 | 0.0 | 0.0 |
| DEX0488_018.nt.8 | 79944.1 | 0.0 | 0.0 | 0.0 | 0.0 |
| DEX0488_019.nt.1 | 79955 | 0.0 | 0.0 | 0.0 | 0.0 |
| DEX0488_019.nt.1 | 79955.1 | 0.0 | 0.0 | 8.3 | 8.3 |
| DEX0488_019.nt.1 | 79956 | 0.0 | 0.0 | 0.0 | 0.0 |
| DEX0488_019.nt.1 | 79956.1 | 0.0 | 0.0 | 0.0 | 0.0 |
| DEX0488_019.nt.1 | 79959 | 0.0 | 0.0 | 0.0 | 0.0 |
| DEX0488_019.nt.1 | 79959.1 | 0.0 | 0.0 | 0.0 | 0.0 |
| DEX0488_019.nt.1 | 79960 | 0.0 | 0.0 | 0.0 | 0.0 |
| DEX0488_019.nt.1 | 79960.1 | 0.0 | 0.0 | 0.0 | 0.0 |
| DEX0488_019.nt.1 | 79963 | 0.0 | 0.0 | 0.0 | 0.0 |
| DEX0488_019.nt.1 | 79963.1 | 0.0 | 0.0 | 0.0 | 0.0 |
| DEX0488_019.nt.1 | 79964 | 0.0 | 0.0 | 0.0 | 0.0 |
| DEX0488_019.nt.1 | 79964.1 | 0.0 | 0.0 | 0.0 | 0.0 |
| DEX0488_019.nt.2 | 79955 | 0.0 | 0.0 | 0.0 | 0.0 |
| DEX0488_019.nt.2 | 79955.1 | 0.0 | 0.0 | 8.3 | 8.3 |
| DEX0488_019.nt.2 | 79956 | 0.0 | 0.0 | 0.0 | 0.0 |
| DEX0488_019.nt.2 | 79956.1 | 0.0 | 0.0 | 0.0 | 0.0 |
| DEX0488_019.nt.2 | 79959 | 0.0 | 0.0 | 0.0 | 0.0 |
| DEX0488_019.nt.2 | 79959.1 | 0.0 | 0.0 | 0.0 | 0.0 |
| DEX0488_019.nt.2 | 79960 | 0.0 | 0.0 | 0.0 | 0.0 |
| DEX0488_019.nt.2 | 79960.1 | 0.0 | 0.0 | 0.0 | 0.0 |
| DEX0488_019.nt.2 | 79963 | 0.0 | 0.0 | 0.0 | 0.0 |
| DEX0488_019.nt.2 | 79963.1 | 0.0 | 0.0 | 0.0 | 0.0 |
| DEX0488_019.nt.2 | 79964 | 0.0 | 0.0 | 0.0 | 0.0 |
| DEX0488_019.nt.2 | 79964.1 | 0.0 | 0.0 | 0.0 | 0.0 |
| DEX0488_019.nt.3 | 79955 | 0.0 | 0.0 | 0.0 | 0.0 |
| DEX0488_019.nt.3 | 79955.1 | 0.0 | 0.0 | 8.3 | 8.3 |
| DEX0488_019.nt.3 | 79956 | 0.0 | 0.0 | 0.0 | 0.0 |
| DEX0488_019.nt.3 | 79956.1 | 0.0 | 0.0 | 0.0 | 0.0 |
| DEX0488_019.nt.3 | 79959 | 0.0 | 0.0 | 0.0 | 0.0 |
| DEX0488_019.nt.3 | 79959.1 | 0.0 | 0.0 | 0.0 | 0.0 |
| DEX0488_019.nt.3 | 79960 | 0.0 | 0.0 | 0.0 | 0.0 |
| DEX0488_019.nt.3 | 79960.1 | 0.0 | 0.0 | 0.0 | 0.0 |
| DEX0488_019.nt.3 | 79963 | 0.0 | 0.0 | 0.0 | 0.0 |
| DEX0488_019.nt.3 | 79963.1 | 0.0 | 0.0 | 0.0 | 0.0 |
| DEX0488_019.nt.3 | 79964 | 0.0 | 0.0 | 0.0 | 0.0 |
| DEX0488_019.nt.3 | 79964.1 | 0.0 | 0.0 | 0.0 | 0.0 |
| DEX0488_019.nt.4 | 79955 | 0.0 | 0.0 | 0.0 | 0.0 |
| DEX0488_019.nt.4 | 79955.1 | 0.0 | 0.0 | 8.3 | 8.3 |
| DEX0488_019.nt.4 | 79956 | 0.0 | 0.0 | 0.0 | 0.0 |
| DEX0488_019.nt.4 | 79956.1 | 0.0 | 0.0 | 0.0 | 0.0 |
| DEX0488_019.nt.4 | 79959 | 0.0 | 0.0 | 0.0 | 0.0 |
| DEX0488_019.nt.4 | 79959.1 | 0.0 | 0.0 | 0.0 | 0.0 |
| DEX0488_019.nt.4 | 79960 | 0.0 | 0.0 | 0.0 | 0.0 |
| DEX0488_019.nt.4 | 79960.1 | 0.0 | 0.0 | 0.0 | 0.0 |
| DEX0488_019.nt.4 | 79963 | 0.0 | 0.0 | 0.0 | 0.0 |
| DEX0488_019.nt.4 | 79963.1 | 0.0 | 0.0 | 0.0 | 0.0 |
| DEX0488_019.nt.4 | 79964 | 0.0 | 0.0 | 0.0 | 0.0 |
| DEX0488_019.nt.4 | 79964.1 | 0.0 | 0.0 | 0.0 | 0.0 |
| DEX0488_019.nt.5 | 79959 | 0.0 | 0.0 | 0.0 | 0.0 |
| DEX0488_019.nt.5 | 79959.1 | 0.0 | 0.0 | 0.0 | 0.0 |
| DEX0488_019.nt.5 | 79960 | 0.0 | 0.0 | 0.0 | 0.0 |
| DEX0488_019.nt.5 | 79960.1 | 0.0 | 0.0 | 0.0 | 0.0 |
| DEX0488_019.nt.6 | 79955 | 0.0 | 0.0 | 0.0 | 0.0 |
| DEX0488_019.nt.6 | 79955.1 | 0.0 | 0.0 | 8.3 | 8.3 |
| DEX0488_019.nt.6 | 79956 | 0.0 | 0.0 | 0.0 | 0.0 |
| DEX0488_019.nt.6 | 79956.1 | 0.0 | 0.0 | 0.0 | 0.0 |
| DEX0488_019.nt.6 | 79959 | 0.0 | 0.0 | 0.0 | 0.0 |
| DEX0488_019.nt.6 | 79959.1 | 0.0 | 0.0 | 0.0 | 0.0 |
| DEX0488_019.nt.6 | 79960 | 0.0 | 0.0 | 0.0 | 0.0 |
| DEX0488_019.nt.6 | 79960.1 | 0.0 | 0.0 | 0.0 | 0.0 |
| DEX0488_019.nt.6 | 79963 | 0.0 | 0.0 | 0.0 | 0.0 |
| DEX0488_019.nt.6 | 79963.1 | 0.0 | 0.0 | 0.0 | 0.0 |
| DEX0488_019.nt.6 | 79964 | 0.0 | 0.0 | 0.0 | 0.0 |
| DEX0488_019.nt.6 | 79964.1 | 0.0 | 0.0 | 0.0 | 0.0 |
| DEX0488_019.nt.7 | 79955 | 0.0 | 0.0 | 0.0 | 0.0 |
| DEX0488_019.nt.7 | 79955.1 | 0.0 | 0.0 | 8.3 | 8.3 |
| DEX0488_019.nt.7 | 79956 | 0.0 | 0.0 | 0.0 | 0.0 |
| DEX0488_019.nt.7 | 79956.1 | 0.0 | 0.0 | 0.0 | 0.0 |
| DEX0488_019.nt.7 | 79959 | 0.0 | 0.0 | 0.0 | 0.0 |
| DEX0488_019.nt.7 | 79959.1 | 0.0 | 0.0 | 0.0 | 0.0 |
| DEX0488_019.nt.7 | 79960 | 0.0 | 0.0 | 0.0 | 0.0 |
| DEX0488_019.nt.7 | 79960.1 | 0.0 | 0.0 | 0.0 | 0.0 |
| DEX0488_019.nt.7 | 79963 | 0.0 | 0.0 | 0.0 | 0.0 |
| DEX0488_019.nt.7 | 79963.1 | 0.0 | 0.0 | 0.0 | 0.0 |
| DEX0488_019.nt.7 | 79964 | 0.0 | 0.0 | 0.0 | 0.0 |
| DEX0488_019.nt.7 | 79964.1 | 0.0 | 0.0 | 0.0 | 0.0 |
| DEX0488_019.nt.8 | 79955 | 0.0 | 0.0 | 0.0 | 0.0 |
| DEX0488_019.nt.8 | 79955.1 | 0.0 | 0.0 | 8.3 | 8.3 |
| DEX0488_019.nt.8 | 79956 | 0.0 | 0.0 | 0.0 | 0.0 |
| DEX0488_019.nt.8 | 79956.1 | 0.0 | 0.0 | 0.0 | 0.0 |
| DEX0488_019.nt.8 | 79959 | 0.0 | 0.0 | 0.0 | 0.0 |
| DEX0488_019.nt.8 | 79959.1 | 0.0 | 0.0 | 0.0 | 0.0 |
| DEX0488_019.nt.8 | 79960 | 0.0 | 0.0 | 0.0 | 0.0 |
| DEX0488_019.nt.8 | 79960.1 | 0.0 | 0.0 | 0.0 | 0.0 |
| DEX0488_019.nt.8 | 79963 | 0.0 | 0.0 | 0.0 | 0.0 |
| DEX0488_019.nt.8 | 79963.1 | 0.0 | 0.0 | 0.0 | 0.0 |
| DEX0488_019.nt.8 | 79964 | 0.0 | 0.0 | 0.0 | 0.0 |
| DEX0488_019.nt.8 | 79964.1 | 0.0 | 0.0 | 0.0 | 0.0 |
| DEX0488_020.nt.1 | 77771 | 0.0 | 0.0 | 0.0 | 0.0 |
| DEX0488_020.nt.1 | 77771.1 | 0.0 | 0.0 | 0.0 | 0.0 |
| DEX0488_020.nt.1 | 77772 | 0.0 | 0.0 | 0.0 | 0.0 |
| DEX0488_020.nt.1 | 77772.1 | 0.0 | 0.0 | 0.0 | 0.0 |
| DEX0488_021.nt.1 | 21187 | 0.0 | 0.0 | 0.0 | 0.0 |
| DEX0488_021.nt.1 | 21187.1 | 0.0 | 0.0 | 0.0 | 0.0 |
| DEX0488_021.nt.1 | 78927 | 0.0 | 0.0 | 0.0 | 0.0 |
| DEX0488_021.nt.1 | 78927.1 | 0.0 | 0.0 | 0.0 | 0.0 |
| DEX0488_021.nt.1 | 78928 | 0.0 | 0.0 | 0.0 | 0.0 |
| DEX0488_021.nt.1 | 78928.1 | 0.0 | 0.0 | 0.0 | 0.0 |
| DEX0488_021.nt.2 | 21187 | 0.0 | 0.0 | 0.0 | 0.0 |
| DEX0488_021.nt.2 | 21187.1 | 0.0 | 0.0 | 0.0 | 0.0 |
| DEX0488_021.nt.2 | 78927 | 0.0 | 0.0 | 0.0 | 0.0 |
| DEX0488_021.nt.2 | 78927.1 | 0.0 | 0.0 | 0.0 | 0.0 |
| DEX0488_021.nt.2 | 78928 | 0.0 | 0.0 | 0.0 | 0.0 |
| DEX0488_021.nt.2 | 78928.1 | 0.0 | 0.0 | 0.0 | 0.0 |
| DEX0488_022.nt.1 | 79699 | 0.0 | 0.0 | 0.0 | 0.0 |
| DEX0488_022.nt.1 | 79699.1 | 0.0 | 0.0 | 0.0 | 0.0 |
| DEX0488_022.nt.1 | 79700 | 0.0 | 0.0 | 0.0 | 0.0 |
| DEX0488_022.nt.1 | 79700.1 | 0.0 | 0.0 | 0.0 | 0.0 |
| DEX0488_022.nt.2 | 79699 | 0.0 | 0.0 | 0.0 | 0.0 |
| DEX0488_022.nt.2 | 79699.1 | 0.0 | 0.0 | 0.0 | 0.0 |
| DEX0488_022.nt.2 | 79700 | 0.0 | 0.0 | 0.0 | 0.0 |
| DEX0488_022.nt.2 | 79700.1 | 0.0 | 0.0 | 0.0 | 0.0 |
| DEX0488_022.nt.3 | 79699 | 0.0 | 0.0 | 0.0 | 0.0 |
| DEX0488_022.nt.3 | 79699.1 | 0.0 | 0.0 | 0.0 | 0.0 |
| DEX0488_022.nt.3 | 79700 | 0.0 | 0.0 | 0.0 | 0.0 |
| DEX0488_022.nt.3 | 79700.1 | 0.0 | 0.0 | 0.0 | 0.0 |
| DEX0488_022.nt.4 | 79699 | 0.0 | 0.0 | 0.0 | 0.0 |
| DEX0488_022.nt.4 | 79699.1 | 0.0 | 0.0 | 0.0 | 0.0 |
| DEX0488_022.nt.4 | 79700 | 0.0 | 0.0 | 0.0 | 0.0 |
| DEX0488_022.nt.4 | 79700.1 | 0.0 | 0.0 | 0.0 | 0.0 |
| DEX0488_022.nt.5 | 79699 | 0.0 | 0.0 | 0.0 | 0.0 |
| DEX0488_022.nt.5 | 79699.1 | 0.0 | 0.0 | 0.0 | 0.0 |
| DEX0488_022.nt.5 | 79700 | 0.0 | 0.0 | 0.0 | 0.0 |
| DEX0488_022.nt.5 | 79700.1 | 0.0 | 0.0 | 0.0 | 0.0 |
| DEX0488_022.nt.6 | 79699 | 0.0 | 0.0 | 0.0 | 0.0 |
| DEX0488_022.nt.6 | 79699.1 | 0.0 | 0.0 | 0.0 | 0.0 |
| DEX0488_022.nt.6 | 79700 | 0.0 | 0.0 | 0.0 | 0.0 |
| DEX0488_022.nt.6 | 79700.1 | 0.0 | 0.0 | 0.0 | 0.0 |
| DEX0488_022.nt.7 | 79699 | 0.0 | 0.0 | 0.0 | 0.0 |
| DEX0488_022.nt.7 | 79699.1 | 0.0 | 0.0 | 0.0 | 0.0 |
| DEX0488_022.nt.7 | 79700 | 0.0 | 0.0 | 0.0 | 0.0 |
| DEX0488_022.nt.7 | 79700.1 | 0.0 | 0.0 | 0.0 | 0.0 |
| DEX0488_022.nt.8 | 79699 | 0.0 | 0.0 | 0.0 | 0.0 |
| DEX0488_022.nt.8 | 79699.1 | 0.0 | 0.0 | 0.0 | 0.0 |
| DEX0488_022.nt.8 | 79700 | 0.0 | 0.0 | 0.0 | 0.0 |
| DEX0488_022.nt.8 | 79700.1 | 0.0 | 0.0 | 0.0 | 0.0 |
| DEX0488_023.nt.1 | 78715 | 0.0 | 0.0 | 8.3 | 10.0 |
| DEX0488_023.nt.1 | 78715.1 | 0.0 | 0.0 | 0.0 | 0.0 |
| DEX0488_023.nt.1 | 78716 | 0.0 | 0.0 | 0.0 | 0.0 |
| DEX0488_023.nt.1 | 78716.1 | 0.0 | 0.0 | 0.0 | 0.0 |
| DEX0488_023.nt.2 | 78715 | 0.0 | 0.0 | 8.3 | 10.0 |
| DEX0488_023.nt.2 | 78715.1 | 0.0 | 0.0 | 0.0 | 0.0 |
| DEX0488_023.nt.2 | 78716 | 0.0 | 0.0 | 0.0 | 0.0 |
| DEX0488_023.nt.2 | 78716.1 | 0.0 | 0.0 | 0.0 | 0.0 |
| DEX0488_024.nt.1 | 79699 | 0.0 | 0.0 | 0.0 | 0.0 |
| DEX0488_024.nt.1 | 79699.1 | 0.0 | 0.0 | 0.0 | 0.0 |
| DEX0488_024.nt.1 | 79700 | 0.0 | 0.0 | 0.0 | 0.0 |
| DEX0488_024.nt.1 | 79700.1 | 0.0 | 0.0 | 0.0 | 0.0 |
| DEX0488_024.nt.2 | 79699 | 0.0 | 0.0 | 0.0 | 0.0 |
| DEX0488_024.nt.2 | 79699.1 | 0.0 | 0.0 | 0.0 | 0.0 |
| DEX0488_024.nt.2 | 79700 | 0.0 | 0.0 | 0.0 | 0.0 |
| DEX0488_024.nt.2 | 79700.1 | 0.0 | 0.0 | 0.0 | 0.0 |
| DEX0488_025.nt.1 | 90527 | 0.0 | 0.0 | 0.0 | 0.0 |
| DEX0488_025.nt.1 | 90527.1 | 0.0 | 0.0 | 0.0 | 0.0 |
| DEX0488_025.nt.1 | 90528 | 0.0 | 0.0 | 0.0 | 0.0 |
| DEX0488_025.nt.1 | 90528.1 | 0.0 | 0.0 | 0.0 | 0.0 |
| DEX0488_025.nt.1 | 90543 | 0.0 | 0.0 | 0.0 | 0.0 |
| DEX0488_025.nt.1 | 90543.1 | 0.0 | 0.0 | 0.0 | 0.0 |
| DEX0488_025.nt.1 | 90544 | 0.0 | 0.0 | 0.0 | 0.0 |
| DEX0488_025.nt.1 | 90544.1 | 0.0 | 0.0 | 0.0 | 0.0 |
| DEX0488_025.nt.1 | 91047 | 0.0 | 0.0 | 0.0 | 0.0 |
| DEX0488_025.nt.1 | 91047.1 | 0.0 | 0.0 | 0.0 | 0.0 |
| DEX0488_025.nt.1 | 91048 | 0.0 | 0.0 | 0.0 | 0.0 |
| DEX0488_025.nt.1 | 91048.1 | 0.0 | 0.0 | 0.0 | 0.0 |
| DEX0488_025.nt.1 | 91051 | 0.0 | 0.0 | 0.0 | 0.0 |
| DEX0488_025.nt.1 | 91051.1 | 0.0 | 0.0 | 0.0 | 0.0 |
| DEX0488_025.nt.1 | 91052 | 0.0 | 0.0 | 0.0 | 0.0 |
| DEX0488_025.nt.1 | 91052.1 | 0.0 | 0.0 | 0.0 | 0.0 |
| DEX0488_025.nt.1 | 91055 | 0.0 | 0.0 | 0.0 | 0.0 |
| DEX0488_025.nt.1 | 91055.1 | 0.0 | 0.0 | 0.0 | 0.0 |
| DEX0488_025.nt.1 | 91056 | 0.0 | 0.0 | 0.0 | 0.0 |
| DEX0488_025.nt.1 | 91056.1 | 0.0 | 0.0 | 0.0 | 0.0 |
| DEX0488_025.nt.1 | 91171 | 0.0 | 0.0 | 0.0 | 0.0 |
| DEX0488_025.nt.1 | 91171.1 | 0.0 | 0.0 | 0.0 | 0.0 |
| DEX0488_025.nt.1 | 91172 | 0.0 | 0.0 | 0.0 | 0.0 |
| DEX0488_025.nt.1 | 91172.1 | 0.0 | 0.0 | 0.0 | 0.0 |
| DEX0488_025.nt.1 | 91271 | 0.0 | 0.0 | 0.0 | 0.0 |
| DEX0488_025.nt.1 | 91271.1 | 0.0 | 0.0 | 0.0 | 0.0 |
| DEX0488_025.nt.1 | 91272 | 0.0 | 0.0 | 0.0 | 0.0 |
| DEX0488_025.nt.1 | 91272.1 | 0.0 | 0.0 | 0.0 | 0.0 |
| DEX0488_025.nt.1 | 91275 | 0.0 | 0.0 | 0.0 | 0.0 |
| DEX0488_025.nt.1 | 91275.1 | 0.0 | 0.0 | 0.0 | 0.0 |
| DEX0488_025.nt.1 | 91276 | 0.0 | 0.0 | 0.0 | 0.0 |
| DEX0488_025.nt.1 | 91276.1 | 0.0 | 0.0 | 0.0 | 0.0 |
| DEX0488_025.nt.2 | 90528 | 0.0 | 0.0 | 0.0 | 0.0 |
| DEX0488_025.nt.2 | 90528.1 | 0.0 | 0.0 | 0.0 | 0.0 |
| DEX0488_025.nt.2 | 90544 | 0.0 | 0.0 | 0.0 | 0.0 |
| DEX0488_025.nt.2 | 90544.1 | 0.0 | 0.0 | 0.0 | 0.0 |
| DEX0488_025.nt.2 | 91172 | 0.0 | 0.0 | 0.0 | 0.0 |
| DEX0488_025.nt.2 | 91172.1 | 0.0 | 0.0 | 0.0 | 0.0 |
| DEX0488_025.nt.2 | 91272 | 0.0 | 0.0 | 0.0 | 0.0 |
| DEX0488_025.nt.2 | 91272.1 | 0.0 | 0.0 | 0.0 | 0.0 |
| DEX0488_025.nt.2 | 91276 | 0.0 | 0.0 | 0.0 | 0.0 |
| DEX0488_025.nt.2 | 91276.1 | 0.0 | 0.0 | 0.0 | 0.0 |
| DEX0488_026.nt.1 | 24160 | 0.0 | 0.0 | 0.0 | 0.0 |
| DEX0488_026.nt.1 | 24160.1 | 0.0 | 0.0 | 0.0 | 0.0 |
| DEX0488_026.nt.1 | 24160.2 | 0.0 | 0.0 | 0.0 | 0.0 |
| DEX0488_026.nt.1 | 24160.3 | 0.0 | 0.0 | 0.0 | 0.0 |
| DEX0488_026.nt.1 | 26816 | 0.0 | 0.0 | 0.0 | 0.0 |
| DEX0488_026.nt.1 | 26816.1 | 0.0 | 0.0 | 0.0 | 0.0 |
| DEX0488_027.nt.1 | 17852 | 17.6 | 21.4 | 8.3 | 25.0 |
| DEX0488_027.nt.1 | 17852.1 | 17.6 | 20.0 | 8.3 | 25.0 |
| DEX0488_027.nt.1 | 17853 | 17.6 | 25.0 | 8.3 | 33.3 |
| DEX0488_027.nt.1 | 17853.1 | 17.6 | 30.0 | 0.0 | 0.0 |
| DEX0488_027.nt.1 | 18644 | 17.6 | 21.4 | 8.3 | 25.0 |
| DEX0488_027.nt.1 | 18644.1 | 17.6 | 21.4 | 8.3 | 25.0 |
| DEX0488_027.nt.1 | 18644.2 | 17.6 | 21.4 | 8.3 | 25.0 |
| DEX0488_027.nt.1 | 18644.3 | 11.8 | 15.4 | 8.3 | 25.0 |
| DEX0488_027.nt.1 | 18645 | 17.6 | 25.0 | 8.3 | 33.3 |
| DEX0488_027.nt.1 | 18645.1 | 17.6 | 25.0 | 8.3 | 33.3 |
| DEX0488_027.nt.1 | 18645.2 | 17.6 | 27.3 | 8.3 | 33.3 |
| DEX0488_027.nt.1 | 18645.3 | 17.6 | 25.0 | 8.3 | 33.3 |
| DEX0488_027.nt.1 | 41955 | 17.6 | 23.1 | 0.0 | 0.0 |
| DEX0488_027.nt.1 | 41955.1 | 17.6 | 25.0 | 0.0 | 0.0 |
| DEX0488_027.nt.1 | 41955.2 | 17.6 | 21.4 | 8.3 | 50.0 |
| DEX0488_027.nt.1 | 41955.3 | 17.6 | 23.1 | 8.3 | 33.3 |
| DEX0488_027.nt.1 | 41955.4 | 17.6 | 21.4 | 8.3 | 20.0 |
| DEX0488_027.nt.1 | 41956 | 17.6 | 25.0 | 0.0 | 0.0 |
| DEX0488_027.nt.1 | 41956.1 | 11.8 | 22.2 | 0.0 | 0.0 |
| DEX0488_027.nt.1 | 41956.2 | 17.6 | 23.1 | 8.3 | 33.3 |
| DEX0488_027.nt.1 | 41956.3 | 17.6 | 25.0 | 0.0 | 0.0 |
| DEX0488_027.nt.1 | 41956.4 | 17.6 | 21.4 | 0.0 | 0.0 |
| DEX0488_027.nt.2 | 17852 | 17.6 | 21.4 | 8.3 | 25.0 |
| DEX0488_027.nt.2 | 17852.1 | 17.6 | 20.0 | 8.3 | 25.0 |
| DEX0488_027.nt.2 | 17853 | 17.6 | 25.0 | 8.3 | 33.3 |
| DEX0488_027.nt.2 | 17853.1 | 17.6 | 30.0 | 0.0 | 0.0 |
| DEX0488_027.nt.2 | 18644 | 17.6 | 21.4 | 8.3 | 25.0 |
| DEX0488_027.nt.2 | 18644.1 | 17.6 | 21.4 | 8.3 | 25.0 |
| DEX0488_027.nt.2 | 18644.2 | 17.6 | 21.4 | 8.3 | 25.0 |
| DEX0488_027.nt.2 | 18644.3 | 11.8 | 15.4 | 8.3 | 25.0 |
| DEX0488_027.nt.2 | 18645 | 17.6 | 25.0 | 8.3 | 33.3 |
| DEX0488_027.nt.2 | 18645.1 | 17.6 | 25.0 | 8.3 | 33.3 |
| DEX0488_027.nt.2 | 18645.2 | 17.6 | 27.3 | 8.3 | 33.3 |
| DEX0488_027.nt.2 | 18645.3 | 17.6 | 25.0 | 8.3 | 33.3 |
| DEX0488_027.nt.3 | 17852 | 17.6 | 21.4 | 8.3 | 25.0 |
| DEX0488_027.nt.3 | 17852.1 | 17.6 | 20.0 | 8.3 | 25.0 |
| DEX0488_027.nt.3 | 17853 | 17.6 | 25.0 | 8.3 | 33.3 |
| DEX0488_027.nt.3 | 17853.1 | 17.6 | 30.0 | 0.0 | 0.0 |
| DEX0488_027.nt.3 | 18644 | 17.6 | 21.4 | 8.3 | 25.0 |
| DEX0488_027.nt.3 | 18644.1 | 17.6 | 21.4 | 8.3 | 25.0 |
| DEX0488_027.nt.3 | 18644.2 | 17.6 | 21.4 | 8.3 | 25.0 |
| DEX0488_027.nt.3 | 18644.3 | 11.8 | 15.4 | 8.3 | 25.0 |
| DEX0488_027.nt.3 | 18645 | 17.6 | 25.0 | 8.3 | 33.3 |
| DEX0488_027.nt.3 | 18645.1 | 17.6 | 25.0 | 8.3 | 33.3 |
| DEX0488_027.nt.3 | 18645.2 | 17.6 | 27.3 | 8.3 | 33.3 |
| DEX0488_027.nt.3 | 18645.3 | 17.6 | 25.0 | 8.3 | 33.3 |
| DEX0488_027.nt.4 | 17852 | 17.6 | 21.4 | 8.3 | 25.0 |
| DEX0488_027.nt.4 | 17852.1 | 17.6 | 20.0 | 8.3 | 25.0 |
| DEX0488_027.nt.4 | 17853 | 17.6 | 25.0 | 8.3 | 33.3 |
| DEX0488_027.nt.4 | 17853.1 | 17.6 | 30.0 | 0.0 | 0.0 |
| DEX0488_027.nt.4 | 18644 | 17.6 | 21.4 | 8.3 | 25.0 |
| DEX0488_027.nt.4 | 18644.1 | 17.6 | 21.4 | 8.3 | 25.0 |
| DEX0488_027.nt.4 | 18644.2 | 17.6 | 21.4 | 8.3 | 25.0 |
| DEX0488_027.nt.4 | 18644.3 | 11.8 | 15.4 | 8.3 | 25.0 |
| DEX0488_027.nt.4 | 18645 | 17.6 | 25.0 | 8.3 | 33.3 |
| DEX0488_027.nt.4 | 18645.1 | 17.6 | 25.0 | 8.3 | 33.3 |
| DEX0488_027.nt.4 | 18645.2 | 17.6 | 27.3 | 8.3 | 33.3 |
| DEX0488_027.nt.4 | 18645.3 | 17.6 | 25.0 | 8.3 | 33.3 |
| DEX0488_028.nt.1 | 33088 | 29.4 | 31.2 | 8.3 | 8.3 |
| DEX0488_028.nt.1 | 33088.1 | 23.5 | 25.0 | 8.3 | 9.1 |
| DEX0488_028.nt.1 | 33088.2 | 29.4 | 33.3 | 8.3 | 8.3 |
| DEX0488_028.nt.1 | 33088.3 | 29.4 | 31.2 | 8.3 | 8.3 |
| DEX0488_029.nt.1 | 79635 | 0.0 | 0.0 | 0.0 | 0.0 |
| DEX0488_029.nt.1 | 79635.1 | 0.0 | 0.0 | 0.0 | 0.0 |
| DEX0488_030.nt.1 | 35317 | 0.0 | 0.0 | 0.0 | 0.0 |
| DEX0488_030.nt.1 | 35317.1 | 0.0 | 0.0 | 0.0 | 0.0 |
| DEX0488_031.nt.1 | 78587 | 0.0 | 0.0 | 0.0 | 0.0 |
| DEX0488_031.nt.1 | 78587.1 | 0.0 | 0.0 | 0.0 | 0.0 |
| DEX0488_031.nt.1 | 78588 | 0.0 | 0.0 | 0.0 | 0.0 |
| DEX0488_031.nt.1 | 78588.1 | 11.8 | 12.5 | 0.0 | 0.0 |
| DEX0488_032.nt.1 | 78711 | 0.0 | 0.0 | 0.0 | 0.0 |
| DEX0488_032.nt.1 | 78711.1 | 0.0 | 0.0 | 0.0 | 0.0 |
| DEX0488_032.nt.1 | 78712 | 0.0 | 0.0 | 0.0 | 0.0 |
| DEX0488_032.nt.1 | 78712.1 | 0.0 | 0.0 | 0.0 | 0.0 |
| DEX0488_033.nt.1 | 79019 | 0.0 | 0.0 | 0.0 | 0.0 |
| DEX0488_033.nt.1 | 79019.1 | 0.0 | 0.0 | 0.0 | 0.0 |
| DEX0488_033.nt.1 | 79020 | 0.0 | 0.0 | 0.0 | 0.0 |
| DEX0488_033.nt.1 | 79020.1 | 0.0 | 0.0 | 0.0 | 0.0 |
| DEX0488_033.nt.2 | 79019 | 0.0 | 0.0 | 0.0 | 0.0 |
| DEX0488_033.nt.2 | 79019.1 | 0.0 | 0.0 | 0.0 | 0.0 |
| DEX0488_033.nt.2 | 79020 | 0.0 | 0.0 | 0.0 | 0.0 |
| DEX0488_033.nt.2 | 79020.1 | 0.0 | 0.0 | 0.0 | 0.0 |
| DEX0488_034.nt.1 | 90123 | 0.0 | 0.0 | 0.0 | 0.0 |
| DEX0488_034.nt.1 | 90123.1 | 0.0 | 0.0 | 0.0 | 0.0 |
| DEX0488_034.nt.1 | 90124 | 0.0 | 0.0 | 0.0 | 0.0 |
| DEX0488_034.nt.1 | 90124.1 | 0.0 | 0.0 | 0.0 | 0.0 |
| DEX0488_035.nt.1 | 79903 | 0.0 | 0.0 | 0.0 | 0.0 |
| DEX0488_035.nt.1 | 79903.1 | 0.0 | 0.0 | 0.0 | 0.0 |
| DEX0488_035.nt.1 | 79904 | 0.0 | 0.0 | 0.0 | 0.0 |
| DEX0488_035.nt.1 | 79904.1 | 0.0 | 0.0 | 0.0 | 0.0 |
| DEX0488_035.nt.2 | 79903 | 0.0 | 0.0 | 0.0 | 0.0 |
| DEX0488_035.nt.2 | 79903.1 | 0.0 | 0.0 | 0.0 | 0.0 |
| DEX0488_035.nt.2 | 79904 | 0.0 | 0.0 | 0.0 | 0.0 |
| DEX0488_035.nt.2 | 79904.1 | 0.0 | 0.0 | 0.0 | 0.0 |
| DEX0488_036.nt.1 | 3976 | 0.0 | 0.0 | 0.0 | 0.0 |
| DEX0488_036.nt.1 | 3976.1 | 0.0 | 0.0 | 0.0 | 0.0 |
| DEX0488_036.nt.1 | 3977 | 0.0 | 0.0 | 0.0 | 0.0 |
| DEX0488_036.nt.1 | 3977.1 | 0.0 | 0.0 | 0.0 | 0.0 |
| DEX0488_036.nt.2 | 3976 | 0.0 | 0.0 | 0.0 | 0.0 |
| DEX0488_036.nt.2 | 3976.1 | 0.0 | 0.0 | 0.0 | 0.0 |
| DEX0488_036.nt.2 | 3977 | 0.0 | 0.0 | 0.0 | 0.0 |
| DEX0488_036.nt.2 | 3977.1 | 0.0 | 0.0 | 0.0 | 0.0 |

SEQ ID NO: 1-100 was up-regulated on various tissue microarrays. Accordingly, nucleotide SEQ ID NO: 1-100 or the encoded protein SEQ ID NO: 161-240 may be used as a cancer therapeutic and/or diagnostic target for the tissues in which expression is shown.

[0522] The following table lists the location (Oligo Location) where the microarray oligos (Oligo ID) map on the transcripts (DEX ID) of the present invention. Each Oligo ID may have been printed multiple times on a single chip as replicates. The Oligo Name is an exemplary replicate (e.g. 1000.01) for the Oligo ID (e.g. 1000), and data from other replicates (e.g. 1000.02, 1000.03) may be reported. Additionally, the Array (Chip Name) that each oligo and oligo replicates were printed on is included.

| | | | | Oligo |
|---|---|---|---|---|
| DEX NT ID | Oligo ID | Oligo Name | Chip Name | Location |
| DEX0488_001.nt.1 | 121041 | A_23_P40174 | UniDEX1 array | 1879-1938 |
| DEX0488_001.nt.1 | 79931 | 79931 | Multi-cancer array | 1892-1951 |
| DEX0488_001.nt.1 | 79932 | 79932 | Multi-cancer array | 1891-1950 |
| DEX0488_001.nt.2 | 121041 | A_23_P40174 | UniDEX1 array | 2197-2256 |
| DEX0488_001.nt.2 | 79931 | 79931 | Multi-cancer array | 2210-2269 |
| DEX0488_001.nt.2 | 79932 | 79932 | Multi-cancer array | 2209-2268 |
| DEX0488_001.nt.3 | 121041 | A_23_P40174 | UniDEX1 array | 2800-2859 |
| DEX0488_001.nt.3 | 79931 | 79931 | Multi-cancer array | 2813-2872 |
| DEX0488_001.nt.3 | 79932 | 79932 | Multi-cancer array | 2812-2871 |
| DEX0488_001.nt.4 | 121041 | A_23_P40174 | UniDEX1 array | 2218-2277 |
| DEX0488_001.nt.4 | 79931 | 79931 | Multi-cancer array | 2231-2290 |
| DEX0488_001.nt.4 | 79932 | 79932 | Multi-cancer array | 2230-2289 |
| DEX0488_001.nt.5 | 121041 | A_23_P40174 | UniDEX1 array | 2123-2182 |
| DEX0488_001.nt.5 | 79931 | 79931 | Multi-cancer array | 2136-2195 |
| DEX0488_001.nt.5 | 79932 | 79932 | Multi-cancer array | 2135-2194 |
| DEX0488_001.nt.6 | 121041 | A_23_P40174 | UniDEX1 array | 2635-2694 |
| DEX0488_001.nt.6 | 79931 | 79931 | Multi-cancer array | 2648-2707 |
| DEX0488_001.nt.6 | 79932 | 79932 | Multi-cancer array | 2647-2706 |
| DEX0488_001.nt.7 | 121041 | A_23_P40174 | UniDEX1 array | 2543-2602 |
| DEX0488_001.nt.7 | 79931 | 79931 | Multi-cancer array | 2556-2615 |
| DEX0488_001.nt.7 | 79932 | 79932 | Multi-cancer array | 2555-2614 |
| DEX0488_001.nt.8 | 121041 | A_23_P40174 | UniDEX1 array | 405-464 |
| DEX0488_001.nt.8 | 79931 | 79931 | Multi-cancer array | 418-477 |
| DEX0488_001.nt.8 | 79932 | 79932 | Multi-cancer array | 417-476 |
| DEX0488_001.nt.9 | 121041 | A_23_P40174 | UniDEX1 array | 2283-2342 |
| DEX0488_001.nt.9 | 79931 | 79931 | Multi-cancer array | 2296-2355 |
| DEX0488_001.nt.9 | 79932 | 79932 | Multi-cancer array | 2295-2354 |
| DEX0488_001.nt.10 | 121041 | A_23_P40174 | UniDEX1 array | 2870-2929 |
| DEX0488_001.nt.10 | 79931 | 79931 | Multi-cancer array | 2883-2942 |
| DEX0488_001.nt.10 | 79932 | 79932 | Multi-cancer array | 2882-2941 |
| DEX0488_001.nt.11 | 121041 | A_23_P40174 | UniDEX1 array | 1976-2035 |
| DEX0488_001.nt.11 | 79931 | 79931 | Multi-cancer array | 1989-2048 |
| DEX0488_001.nt.11 | 79932 | 79932 | Multi-cancer array | 1988-2047 |
| DEX0488_002.nt.1 | 114928 | A_23_P48886 | UniDEX1 array | 1027-1086 |
| DEX0488_002.nt.1 | 91111 | 91111 | Multi-cancer array | 1360-1419 |
| DEX0488_002.nt.1 | 91112 | 91112 | Multi-cancer array | 1320-1379 |
| DEX0488_003.nt.1 | 112741 | A_23_P121533 | UniDEX1 array | 346-405 |
| DEX0488_003.nt.1 | 24496 | 24496.02 | Prostatel array | 174-233 |
| DEX0488_003.nt.1 | 27921 | 27921 | Multi-cancer array | 174-233 |
| DEX0488_003.nt.1 | 27922 | 27922 | Multi-cancer array | 151-210 |
| DEX0488_003.nt.1 | 78855 | 78855 | Multi-cancer array | 356-415 |
| DEX0488_003.nt.1 | 78856 | 78856 | Multi-cancer array | 351-410 |
| DEX0488_003.nt.2 | 112741 | A_23_P121533 | UniDEX1 array | 4942-5001 |
| DEX0488_003.nt.2 | 24474 | 24474.01 | Prostatel array | 4195-4254 |
| DEX0488_003.nt.2 | 24496 | 24496.02 | Prostatel array | 4770-4829 |
| DEX0488_003.nt.2 | 24536 | 24536.02 | Prostatel array | 558-617 |
| DEX0488_003.nt.2 | 27921 | 27921 | Multi-cancer array | 4770-4829 |
| DEX0488_003.nt.2 | 27922 | 27922 | Multi-cancer array | 4747-4806 |
| DEX0488_003.nt.2 | 78855 | 78855 | Multi-cancer array | 4952-5011 |
| DEX0488_003.nt.2 | 78856 | 78856 | Multi-cancer array | 4947-5006 |
| DEX0488_003.nt.3 | 112741 | A_23_P121533 | UniDEX1 array | 5307-5366 |
| DEX0488_003.nt.3 | 24474 | 24474.01 | Prostatel array | 4560-4619 |
| DEX0488_003.nt.3 | 24496 | 24496.02 | Prostatel array | 5135-5194 |
| DEX0488_003.nt.3 | 24536 | 24536.02 | Prostatel array | 923-982 |
| DEX0488_003.nt.3 | 27921 | 27921 | Multi-cancer array | 5135-5194 |
| DEX0488_003.nt.3 | 27922 | 27922 | Multi-cancer array | 5112-5171 |
| DEX0488_003.nt.3 | 78855 | 78855 | Multi-cancer array | 5317-5376 |
| DEX0488_003.nt.3 | 78856 | 78856 | Multi-cancer array | 5312-5371 |
| DEX0488_003.nt.4 | 112741 | A_23_P121533 | UniDEX1 array | 4828-4887 |
| DEX0488_003.nt.4 | 24474 | 24474.01 | Prostatel array | 4081-4140 |
| DEX0488_003.nt.4 | 24496 | 24496.02 | Prostatel array | 4656-4715 |
| DEX0488_003.nt.4 | 24536 | 24536.02 | Prostatel array | 444-503 |
| DEX0488_003.nt.4 | 27921 | 27921 | Multi-cancer array | 4656-4715 |
| DEX0488_003.nt.4 | 27922 | 27922 | Multi-cancer array | 4633-4692 |
| DEX0488_003.nt.4 | 78855 | 78855 | Multi-cancer array | 4838-4897 |
| DEX0488_003.nt.4 | 78856 | 78856 | Multi-cancer array | 4833-4892 |
| DEX0488_003.nt.5 | 112741 | A_23_P121533 | UniDEX1 array | 5016-5075 |
| DEX0488_003.nt.5 | 24474 | 24474.01 | Prostatel array | 4269-4328 |
| DEX0488_003.nt.5 | 24496 | 24496.02 | Prostatel array | 4844-4903 |
| DEX0488_003.nt.5 | 24536 | 24536.02 | Prostatel array | 632-691 |
| DEX0488_003.nt.5 | 27921 | 27921 | Multi-cancer array | 4844-4903 |
| DEX0488_003.nt.5 | 27922 | 27922 | Multi-cancer array | 4821-4880 |
| DEX0488_003.nt.5 | 78855 | 78855 | Multi-cancer array | 5026-5085 |
| DEX0488_003.nt.5 | 78856 | 78856 | Multi-cancer array | 5021-5080 |
| DEX0488_003.nt.6 | 112741 | A_23_P121533 | UniDEX1 array | 2197-2256 |
| DEX0488_003.nt.6 | 24496 | 24496.02 | Prostatel array | 2025-2084 |
| DEX0488_003.nt.6 | 24536 | 24536.02 | Prostatel array | 558-617 |
| DEX0488_003.nt.6 | 27921 | 27921 | Multi-cancer array | 2025-2084 |
| DEX0488_003.nt.6 | 27922 | 27922 | Multi-cancer array | 2002-2061 |
| DEX0488_003.nt.6 | 78855 | 78855 | Multi-cancer array | 2207-2266 |
| DEX0488_003.nt.6 | 78856 | 78856 | Multi-cancer array | 2202-2261 |
| DEX0488_003.nt.7 | 112741 | A_23_P121533 | UniDEX1 array | 246-305 |
| DEX0488_003.nt.7 | 78855 | 78855 | Multi-cancer array | 256-315 |
| DEX0488_003.nt.7 | 78856 | 78856 | Multi-cancer array | 251-310 |
| DEX0488_004.nt.1 | 10666 | 10666 | Multi-cancer array | 762-821 |
| DEX0488_004.nt.1 | 10667 | 10667 | Multi-cancer array | 722-781 |
| DEX0488_005.nt.1 | 121606 | A_23_P123276 | UniDEX1 array | 2037-2096 |
| DEX0488_005.nt.1 | 9744 | 9744 | Multi-cancer array | 3051-3110 |
| DEX0488_005.nt.1 | 9745 | 9745.1 | Multi-cancer array | 3005-3064 |
| DEX0488_006.nt.1 | 118505 | A_23_P218128 | UniDEX1 array | 181-240 |
| DEX0488_006.nt.1 | 1202 | 1202 | Lung array | 367-426 |
| DEX0488_006.nt.1 | 1203 | 1203 | Lung array | 320-379 |
| DEX0488_006.nt.1 | 4353 | 4353 | Multi-cancer array | 274-333 |
| DEX0488_006.nt.1 | 5804 | 5804 | Multi-cancer array | 320-379 |
| DEX0488_006.nt.1 | 31028 | 31028 | Colon array | 305-364 |
| DEX0488_006.nt.1 | 31029 | 31029 | Colon array | 265-324 |
| DEX0488_006.nt.1 | 31059 | 31059 | Colon array | 373-432 |
| DEX0488_006.nt.1 | 92287 | 92287 | Multi-cancer array | 372-431 |
| DEX0488_007.nt.1 | 41955 | 41955.2 | Multi-cancer array | 397-456 |
| DEX0488_007.nt.1 | 41956 | 41956 | Multi-cancer array | 397-456 |
| DEX0488_008.nt.1 | 107898 | A_23_P257296 | UniDEX1 array | 183-242 |
| DEX0488_008.nt.1 | 2084 | 2084 | Lung array | 193-252 |
| DEX0488_008.nt.1 | 2085 | 2085 | Multi-cancer array | 183-242 |
| DEX0488_008.nt.1 | 4909 | 4909 | Multi-cancer array | 248-307 |
| DEX0488_008.nt.1 | 4910 | 4910 | Multi-cancer array | 208-267 |
| DEX0488_008.nt.1 | 17244 | 17244 | Breast array | 193-252 |
| DEX0488_008.nt.1 | 17292 | 17292 | Breast array | 248-307 |
| DEX0488_008.nt.1 | 17293 | 17293 | Multi-cancer array | 208-267 |
| DEX0488_008.nt.1 | 20399 | 20399 | Breast array | 253-312 |
| DEX0488_008.nt.1 | 24404 | 24404 | Multi-cancer array | 248-307 |
| DEX0488_008.nt.1 | 24405 | 24405 | Multi-cancer array | 208-267 |
| DEX0488_008.nt.1 | 24456 | 24456.02 | Prostatel array | 193-252 |
| DEX0488_008.nt.1 | 30021 | 30021.02 | Prostatel array | 253-312 |
| DEX0488_008.nt.2 | 107898 | A_23_P257296 | UniDEX1 array | 376-435 |
| DEX0488_008.nt.2 | 2084 | 2084 | Lung array | 386-445 |
| DEX0488_008.nt.2 | 2085 | 2085 | Multi-cancer array | 376-435 |
| DEX0488_008.nt.2 | 4909 | 4909 | Multi-cancer array | 441-500 |
| DEX0488_008.nt.2 | 4910 | 4910 | Multi-cancer array | 401-460 |
| DEX0488_008.nt.2 | 17244 | 17244 | Breast array | 386-445 |
| DEX0488_008.nt.2 | 17292 | 17292 | Breast array | 441-500 |
| DEX0488_008.nt.2 | 17293 | 17293 | Multi-cancer array | 401-460 |
| DEX0488_008.nt.2 | 20399 | 20399 | Breast array | 446-505 |
| DEX0488_008.nt.2 | 24404 | 24404 | Multi-cancer array | 441-500 |
| DEX0488_008.nt.2 | 24405 | 24405 | Multi-cancer array | 401-460 |
| DEX0488_008.nt.2 | 24456 | 24456.02 | Prostatel array | 386-445 |
| DEX0488_008.nt.2 | 30021 | 30021.02 | Prostatel array | 446-505 |
| DEX0488_009.nt.1 | 121163 | A_23_P84596 | UniDEX1 array | 749-808 |
| DEX0488_009.nt.1 | 79339 | 79339 | Multi-cancer array | 619-678 |
| DEX0488_010.nt.1 | 26770 | 26770 | Breast array | 710-769 |
| DEX0488_011.nt.1 | 113373 | A_23_P9571 | UniDEX1 array | 2107-2166 |
| DEX0488_011.nt.1 | 33840 | 33840 | Colon array | 2932-2991 |
| DEX0488_011.nt.1 | 33841 | 33841 | Colon array | 2668-2727 |
| DEX0488_011.nt.1 | 39927 | 39927.2 | Breast array | 2932-2991 |
| DEX0488_011.nt.1 | 39928 | 39928 | Breast array | 2668-2727 |
| DEX0488_012.nt.1 | 114808 | A_23_P64828 | UniDEX1 array | 52-111 |
| DEX0488_012.nt.1 | 21187 | 21187.2 | Breast array | 404-463 |
| DEX0488_012.nt.1 | 21188 | 21188 | Breast array | 72-131 |
| DEX0488_012.nt.1 | 78927 | 78927 | Multi-cancer array | 488-547 |
| DEX0488_013.nt.1 | 113683 | A_23_P118174 | UniDEX1 array | 415-474 |
| DEX0488_013.nt.1 | 79955 | 79955 | Multi-cancer array | 795-854 |
| DEX0488_013.nt.1 | 79956 | 79956 | Multi-cancer array | 803-862 |
| DEX0488_013.nt.1 | 79959 | 79959 | Multi-cancer array | 901-960 |
| DEX0488_013.nt.1 | 79960 | 79960 | Multi-cancer array | 881-940 |
| DEX0488_013.nt.1 | 79963 | 79963 | Multi-cancer array | 805-864 |
| DEX0488_013.nt.1 | 79964 | 79964 | Multi-cancer array | 800-859 |
| DEX0488_013.nt.2 | 113683 | A_23_P118174 | UniDEX1 array | 415-474 |
| DEX0488_013.nt.2 | 79959 | 79959 | Multi-cancer array | 900-959 |
| DEX0488_013.nt.2 | 79960 | 79960 | Multi-cancer array | 880-939 |
| DEX0488_014.nt.1 | 109994 | A_23_P114783 | UniDEX1 array | 1079-1138 |
| DEX0488_014.nt.1 | 90171 | 90171 | Multi-cancer array | 1372-1431 |
| DEX0488_014.nt.1 | 90172 | 90172 | Multi-cancer array | 1352-1411 |
| DEX0488_014.nt.2 | 109994 | A_23_P114783 | UniDEX1 array | 652-711 |
| DEX0488_014.nt.2 | 90171 | 90171 | Multi-cancer array | 945-1004 |
| DEX0488_014.nt.2 | 90172 | 90172 | Multi-cancer array | 925-984 |
| DEX0488_014.nt.3 | 109994 | A_23_P114783 | UniDEX1 array | 1369-1428 |
| DEX0488_014.nt.3 | 90171 | 90171 | Multi-cancer array | 1662-1721 |
| DEX0488_014.nt.3 | 90172 | 90172 | Multi-cancer array | 1642-1701 |
| DEX0488_014.nt.4 | 109994 | A_23_P114783 | UniDEX1 array | 3929-3988 |
| DEX0488_014.nt.4 | 90171 | 90171 | Multi-cancer array | 4222-4281 |
| DEX0488_014.nt.4 | 90172 | 90172 | Multi-cancer array | 4202-4261 |
| DEX0488_015.nt.1 | 112931 | A_23_P167005 | UniDEX1 array | 1231-1290 |
| DEX0488_015.nt.1 | 33870 | 33870 | Colon array | 1211-1270 |
| DEX0488_015.nt.1 | 78631 | 78631 | Multi-cancer array | 1858-1917 |
| DEX0488_015.nt.1 | 78632 | 78632 | Multi-cancer array | 1848-1907 |
| DEX0488_015.nt.2 | 112931 | A_23_P167005 | UniDEX1 array | 1073-1132 |
| DEX0488_015.nt.2 | 33870 | 33870 | Colon array | 1053-1112 |
| DEX0488_015.nt.2 | 33871 | 33871 | Colon array | 490-549 |
| DEX0488_015.nt.2 | 78631 | 78631 | Multi-cancer array | 1700-1759 |
| DEX0488_015.nt.2 | 78632 | 78632 | Multi-cancer array | 1690-1749 |
| DEX0488_016.nt.1 | 79660 | 79660 | Multi-cancer array | 3168-3227 |
| DEX0488_016.nt.8 | 110604 | A_23_P120974 | UniDEX1 array | 1183-1242 |
| DEX0488_016.nt.8 | 79660 | 79660 | Multi-cancer array | 2374-2433 |
| DEX0488_016.nt.10 | 79659 | 79659 | Multi-cancer array | 3243-3302 |
| DEX0488_016.nt.10 | 79660 | 79660 | Multi-cancer array | 3303-3362 |
| DEX0488_016.nt.11 | 79659 | 79659 | Multi-cancer array | 4111-4170 |
| DEX0488_016.nt.11 | 79660 | 79660 | Multi-cancer array | 4171-4230 |
| DEX0488_017.nt.1 | 1202 | 1202 | Lung array | 215-274 |
| DEX0488_017.nt.1 | 1203 | 1203 | Lung array | 168-227 |
| DEX0488_017.nt.1 | 4353 | 4353 | Multi-cancer array | 122-181 |
| DEX0488_017.nt.1 | 5804 | 5804 | Multi-cancer array | 168-227 |
| DEX0488_017.nt.1 | 31028 | 31028 | Colon array | 153-212 |
| DEX0488_017.nt.1 | 31029 | 31029 | Colon array | 113-172 |
| DEX0488_017.nt.1 | 31059 | 31059 | Colon array | 221-280 |
| DEX0488_017.nt.1 | 92287 | 92287 | Multi-cancer array | 220-279 |
| DEX0488_018.nt.1 | 114024 | A_23_P22052 | UniDEX1 array | 1094-1153 |
| DEX0488_018.nt.1 | 121145 | A_23_P206632 | UniDEX1 array | 743-802 |
| DEX0488_018.nt.1 | 79936 | 79936 | Multi-cancer array | 738-797 |
| DEX0488_018.nt.1 | 79944 | 79944 | Multi-cancer array | 738-797 |
| DEX0488_018.nt.2 | 114024 | A_23_P22052 | UniDEX1 array | 2616-2675 |
| DEX0488_018.nt.2 | 121145 | A_23_P206632 | UniDEX1 array | 2265-2324 |
| DEX0488_018.nt.2 | 79936 | 79936 | Multi-cancer array | 2260-2319 |
| DEX0488_018.nt.2 | 79944 | 79944 | Multi-cancer array | 2260-2319 |
| DEX0488_018.nt.3 | 114024 | A_23_P22052 | UniDEX1 array | 1197-1256 |
| DEX0488_018.nt.3 | 121145 | A_23_P206632 | UniDEX1 array | 846-905 |
| DEX0488_018.nt.3 | 79936 | 79936 | Multi-cancer array | 841-900 |
| DEX0488_018.nt.3 | 79944 | 79944 | Multi-cancer array | 841-900 |
| DEX0488_018.nt.4 | 114024 | A_23_P22052 | UniDEX1 array | 2544-2603 |
| DEX0488_018.nt.4 | 121145 | A_23_P206632 | UniDEX1 array | 2193-2252 |
| DEX0488_018.nt.4 | 79936 | 79936 | Multi-cancer array | 2188-2247 |
| DEX0488_018.nt.4 | 79944 | 79944 | Multi-cancer array | 2188-2247 |
| DEX0488_018.nt.5 | 114024 | A_23_P22052 | UniDEX1 array | 1166-1225 |
| DEX0488_018.nt.5 | 121145 | A_23_P206632 | UniDEX1 array | 815-874 |
| DEX0488_018.nt.5 | 79936 | 79936 | Multi-cancer array | 810-869 |
| DEX0488_018.nt.5 | 79944 | 79944 | Multi-cancer array | 810-869 |
| DEX0488_018.nt.6 | 114024 | A_23_P22052 | UniDEX1 array | 1125-1184 |
| DEX0488_018.nt.6 | 121145 | A_23_P206632 | UniDEX1 array | 774-833 |
| DEX0488_018.nt.6 | 79936 | 79936 | Multi-cancer array | 769-828 |
| DEX0488_018.nt.6 | 79944 | 79944 | Multi-cancer array | 769-828 |
| DEX0488_018.nt.7 | 114024 | A_23_P22052 | UniDEX1 array | 1316-1375 |
| DEX0488_018.nt.7 | 121145 | A_23_P206632 | UniDEX1 array | 965-1024 |
| DEX0488_018.nt.7 | 79936 | 79936 | Multi-cancer array | 960-1019 |
| DEX0488_018.nt.7 | 79944 | 79944 | Multi-cancer array | 960-1019 |
| DEX0488_018.nt.8 | 114024 | A_23_P22052 | UniDEX1 array | 1374-1433 |
| DEX0488_018.nt.8 | 121145 | A_23_P206632 | UniDEX1 array | 1023-1082 |
| DEX0488_018.nt.8 | 79936 | 79936 | Multi-cancer array | 1018-1077 |
| DEX0488_018.nt.8 | 79944 | 79944 | Multi-cancer array | 1018-1077 |
| DEX0488_019.nt.1 | 79955 | 79955 | Multi-cancer array | 2157-2216 |
| DEX0488_019.nt.1 | 79956 | 79956 | Multi-cancer array | 2165-2224 |
| DEX0488_019.nt.1 | 79959 | 79959 | Multi-cancer array | 2263-2322 |
| DEX0488_019.nt.1 | 79960 | 79960 | Multi-cancer array | 2243-2302 |
| DEX0488_019.nt.1 | 79963 | 79963 | Multi-cancer array | 2167-2226 |
| DEX0488_019.nt.1 | 79964 | 79964 | Multi-cancer array | 2162-2221 |
| DEX0488_019.nt.2 | 79955 | 79955 | Multi-cancer array | 400-459 |
| DEX0488_019.nt.2 | 79956 | 79956 | Multi-cancer array | 408-467 |
| DEX0488_019.nt.2 | 79959 | 79959 | Multi-cancer array | 506-565 |
| DEX0488_019.nt.2 | 79960 | 79960 | Multi-cancer array | 486-545 |
| DEX0488_019.nt.2 | 79963 | 79963 | Multi-cancer array | 410-469 |
| DEX0488_019.nt.2 | 79964 | 79964 | Multi-cancer array | 405-464 |
| DEX0488_019.nt.3 | 113683 | A_23_P118174 | UniDEX1 array | 2735-2794 |
| DEX0488_019.nt.3 | 79955 | 79955 | Multi-cancer array | 3104-3163 |
| DEX0488_019.nt.3 | 79956 | 79956 | Multi-cancer array | 3112-3171 |
| DEX0488_019.nt.3 | 79959 | 79959 | Multi-cancer array | 3210-3269 |
| DEX0488_019.nt.3 | 79960 | 79960 | Multi-cancer array | 3190-3249 |
| DEX0488_019.nt.3 | 79963 | 79963 | Multi-cancer array | 3114-3173 |
| DEX0488_019.nt.3 | 79964 | 79964 | Multi-cancer array | 3109-3168 |
| DEX0488_019.nt.4 | 79955 | 79955 | Multi-cancer array | 390-449 |
| DEX0488_019.nt.4 | 79956 | 79956 | Multi-cancer array | 398-457 |
| DEX0488_019.nt.4 | 79959 | 79959 | Multi-cancer array | 496-555 |
| DEX0488_019.nt.4 | 79960 | 79960 | Multi-cancer array | 476-535 |
| DEX0488_019.nt.4 | 79963 | 79963 | Multi-cancer array | 400-459 |
| DEX0488_019.nt.4 | 79964 | 79964 | Multi-cancer array | 395-454 |
| DEX0488_019.nt.5 | 79959 | 79959 | Multi-cancer array | 958-1017 |
| DEX0488_019.nt.5 | 79960 | 79960 | Multi-cancer array | 938-997 |
| DEX0488_019.nt.6 | 113683 | A_23_P118174 | UniDEX1 array | 3229-3288 |
| DEX0488_019.nt.6 | 79955 | 79955 | Multi-cancer array | 3598-3657 |
| DEX0488_019.nt.6 | 79956 | 79956 | Multi-cancer array | 3606-3665 |
| DEX0488_019.nt.6 | 79959 | 79959 | Multi-cancer array | 3704-3763 |
| DEX0488_019.nt.6 | 79960 | 79960 | Multi-cancer array | 3684-3743 |
| DEX0488_019.nt.6 | 79963 | 79963 | Multi-cancer array | 3608-3667 |
| DEX0488_019.nt.6 | 79964 | 79964 | Multi-cancer array | 3603-3662 |
| DEX0488_019.nt.7 | 79955 | 79955 | Multi-cancer array | 383-442 |
| DEX0488_019.nt.7 | 79956 | 79956 | Multi-cancer array | 391-450 |
| DEX0488_019.nt.7 | 79959 | 79959 | Multi-cancer array | 489-548 |
| DEX0488_019.nt.7 | 79960 | 79960 | Multi-cancer array | 469-528 |
| DEX0488_019.nt.7 | 79963 | 79963 | Multi-cancer array | 393-452 |
| DEX0488_019.nt.7 | 79964 | 79964 | Multi-cancer array | 388-447 |
| DEX0488_019.nt.8 | 113683 | A_23_P118174 | UniDEX1 array | 1530-1589 |
| DEX0488_019.nt.8 | 79955 | 79955 | Multi-cancer array | 1899-1958 |
| DEX0488_019.nt.8 | 79956 | 79956 | Multi-cancer array | 1907-1966 |
| DEX0488_019.nt.8 | 79959 | 79959 | Multi-cancer array | 2005-2064 |
| DEX0488_019.nt.8 | 79960 | 79960 | Multi-cancer array | 1985-2044 |
| DEX0488_019.nt.8 | 79963 | 79963 | Multi-cancer array | 1909-1968 |
| DEX0488_019.nt.8 | 79964 | 79964 | Multi-cancer array | 1904-1963 |
| DEX0488_020.nt.1 | 77771 | 77771 | Multi-cancer array | 672-731 |
| DEX0488_020.nt.1 | 77772 | 77772 | Multi-cancer array | 667-726 |
| DEX0488_021.nt.1 | 21187 | 21187.2 | Breast array | 941-1000 |
| DEX0488_021.nt.1 | 78927 | 78927 | Multi-cancer array | 1026-1085 |
| DEX0488_021.nt.1 | 78928 | 78928 | Multi-cancer array | 901-960 |
| DEX0488_021.nt.2 | 21187 | 21187.2 | Breast array | 385-444 |
| DEX0488_021.nt.2 | 78927 | 78927 | Multi-cancer array | 470-529 |
| DEX0488_021.nt.2 | 78928 | 78928 | Multi-cancer array | 345-404 |
| DEX0488_022.nt.1 | 79699 | 79699 | Multi-cancer array | 263-322 |
| DEX0488_022.nt.1 | 79700 | 79700 | Multi-cancer array | 262-321 |
| DEX0488_022.nt.2 | 116057 | A_23_P116557 | UniDEX1 array | 3106-3165 |
| DEX0488_022.nt.2 | 117710 | A_23_P101025 | UniDEX1 array | 3329-3388 |
| DEX0488_022.nt.2 | 21553 | 21553.01 | Ovary1 array | 2848-2907 |
| DEX0488_022.nt.2 | 21577 | 21577.02 | Ovary1 array | 744-803 |
| DEX0488_022.nt.2 | 79699 | 79699 | Multi-cancer array | 3765-3824 |
| DEX0488_022.nt.2 | 79700 | 79700 | Multi-cancer array | 3764-3823 |
| DEX0488_022.nt.3 | 116057 | A_23_P116557 | UniDEX1 array | 2894-2953 |
| DEX0488_022.nt.3 | 117710 | A_23_P101025 | UniDEX1 array | 3117-3176 |
| DEX0488_022.nt.3 | 21553 | 21553.01 | Ovary1 array | 2636-2695 |
| DEX0488_022.nt.3 | 21577 | 21577.02 | Ovary1 array | 744-803 |
| DEX0488_022.nt.3 | 79699 | 79699 | Multi-cancer array | 3553-3612 |
| DEX0488_022.nt.3 | 79700 | 79700 | Multi-cancer array | 3552-3611 |
| DEX0488_022.nt.4 | 116057 | A_23_P116557 | UniDEX1 array | 3617-3676 |
| DEX0488_022.nt.4 | 117710 | A_23_P101025 | UniDEX1 array | 3840-3899 |
| DEX0488_022.nt.4 | 21553 | 21553.01 | Ovary1 array | 3359-3418 |
| DEX0488_022.nt.4 | 21577 | 21577.02 | Ovary1 array | 744-803 |
| DEX0488_022.nt.4 | 79699 | 79699 | Multi-cancer array | 4276-4335 |
| DEX0488_022.nt.4 | 79700 | 79700 | Multi-cancer array | 4275-4334 |
| DEX0488_022.nt.5 | 116057 | A_23_P116557 | UniDEX1 array | 1154-1213 |
| DEX0488_022.nt.5 | 117710 | A_23_P101025 | UniDEX1 array | 1377-1436 |
| DEX0488_022.nt.5 | 21553 | 21553.01 | Ovary1 array | 1059-1118 |
| DEX0488_022.nt.5 | 21577 | 21577.02 | Ovary1 array | 744-803 |
| DEX0488_022.nt.5 | 79699 | 79699 | Multi-cancer array | 1813-1872 |
| DEX0488_022.nt.5 | 79700 | 79700 | Multi-cancer array | 1812-1871 |
| DEX0488_022.nt.6 | 116057 | A_23_P116557 | UniDEX1 array | 532-591 |
| DEX0488_022.nt.6 | 117710 | A_23_P101025 | UniDEX1 array | 755-814 |
| DEX0488_022.nt.6 | 79699 | 79699 | Multi-cancer array | 1191-1250 |
| DEX0488_022.nt.6 | 79700 | 79700 | Multi-cancer array | 1190-1249 |
| DEX0488_022.nt.7 | 117710 | A_23_P101025 | UniDEX1 array | 514-573 |
| DEX0488_022.nt.7 | 79699 | 79699 | Multi-cancer array | 883-942 |
| DEX0488_022.nt.7 | 79700 | 79700 | Multi-cancer array | 882-941 |
| DEX0488_022.nt.8 | 79699 | 79699 | Multi-cancer array | 310-369 |
| DEX0488_022.nt.8 | 79700 | 79700 | Multi-cancer array | 309-368 |
| DEX0488_023.nt.1 | 8828 | 8828 | Breast array | 1629-1688 |
| DEX0488_023.nt.1 | 78715 | 78715 | Multi-cancer array | 1628-1687 |
| DEX0488_023.nt.1 | 78716 | 78716 | Multi-cancer array | 1616-1675 |
| DEX0488_023.nt.2 | 8828 | 8828 | Breast array | 1461-1520 |
| DEX0488_023.nt.2 | 78715 | 78715 | Multi-cancer array | 1460-1519 |
| DEX0488_023.nt.2 | 78716 | 78716 | Multi-cancer array | 1448-1507 |
| DEX0488_024.nt.1 | 116057 | A_23_P116557 | UniDEX1 array | 1317-1376 |
| DEX0488_024.nt.1 | 117710 | A_23_P101025 | UniDEX1 array | 1540-1599 |
| DEX0488_024.nt.1 | 14344 | 14344 | Colon array | 1045-1104 |
| DEX0488_024.nt.1 | 14345 | 14345 | Colon array | 993-1052 |
| DEX0488_024.nt.1 | 21553 | 21553.01 | Ovary1 array | 908-967 |
| DEX0488_024.nt.1 | 21577 | 21577.02 | Ovary1 array | 309-368 |
| DEX0488_024.nt.1 | 79699 | 79699 | Multi-cancer array | 1976-2035 |
| DEX0488_024.nt.1 | 79700 | 79700 | Multi-cancer array | 1975-2034 |
| DEX0488_024.nt.2 | 116057 | A_23_P116557 | UniDEX1 array | 527-586 |
| DEX0488_024.nt.2 | 117710 | A_23_P101025 | UniDEX1 array | 750-809 |
| DEX0488_024.nt.2 | 14344 | 14344 | Colon array | 255-314 |
| DEX0488_024.nt.2 | 14345 | 14345 | Colon array | 203-262 |
| DEX0488_024.nt.2 | 79699 | 79699 | Multi-cancer array | 1186-1245 |
| DEX0488_024.nt.2 | 79700 | 79700 | Multi-cancer array | 1185-1244 |
| DEX0488_025.nt.1 | 122436 | A_23_P66543 | UniDEX1 array | 2587-2646 |
| DEX0488_025.nt.1 | 90527 | 90527 | Multi-cancer array | 3281-3340 |
| DEX0488_025.nt.1 | 90528 | 90528 | Multi-cancer array | 4009-4068 |
| DEX0488_025.nt.1 | 90543 | 90543 | Multi-cancer array | 3281-3340 |
| DEX0488_025.nt.1 | 90544 | 90544 | Multi-cancer array | 4009-4068 |
| DEX0488_025.nt.1 | 91047 | 91047 | Multi-cancer array | 2145-2204 |
| DEX0488_025.nt.1 | 91048 | 91048 | Multi-cancer array | 2144-2203 |
| DEX0488_025.nt.1 | 91051 | 91051 | Multi-cancer array | 2145-2204 |
| DEX0488_025.nt.1 | 91052 | 91052 | Multi-cancer array | 2144-2203 |
| DEX0488_025.nt.1 | 91055 | 91055 | Multi-cancer array | 2145-2204 |
| DEX0488_025.nt.1 | 91056 | 91056 | Multi-cancer array | 2144-2203 |
| DEX0488_025.nt.1 | 91171 | 91171 | Multi-cancer array | 3281-3340 |
| DEX0488_025.nt.1 | 91172 | 91172 | Multi-cancer array | 4009-4068 |
| DEX0488_025.nt.1 | 91271 | 91271 | Multi-cancer array | 3281-3340 |
| DEX0488_025.nt.1 | 91272 | 91272 | Multi-cancer array | 4009-4068 |
| DEX0488_025.nt.1 | 91275 | 91275 | Multi-cancer array | 3281-3340 |
| DEX0488_025.nt.1 | 91276 | 91276 | Multi-cancer array | 4009-4068 |
| DEX0488_025.nt.2 | 90528 | 90528 | Multi-cancer array | 246-305 |
| DEX0488_025.nt.2 | 90544 | 90544 | Multi-cancer array | 246-305 |
| DEX0488_025.nt.2 | 91172 | 91172 | Multi-cancer array | 246-305 |
| DEX0488_025.nt.2 | 91272 | 91272 | Multi-cancer array | 246-305 |
| DEX0488_025.nt.2 | 91276 | 91276 | Multi-cancer array | 246-305 |
| DEX0488_026.nt.1 | 106780 | A_23_P164702 | UniDEX1 array | 1032-1091 |
| DEX0488_026.nt.1 | 24160 | 24160.2 | Breast array | 1219-1278 |
| DEX0488_026.nt.1 | 26816 | 26816 | Multi-cancer array | 1219-1278 |
| DEX0488_026.nt.1 | 28205 | 28205.01 | Prostate1 array | 1252-1311 |
| DEX0488_026.nt.1 | 28251 | 28251.02 | Prostate1 array | 1252-1311 |
| DEX0488_026.nt.1 | 30892 | 30892.02 | Prostate2 array | 1252-1311 |
| DEX0488_027.nt.1 | 112185 | A_23_P169437 | UniDEX1 array | 686-745 |
| DEX0488_027.nt.1 | 15783 | 15783 | Breast array | 816-875 |
| DEX0488_027.nt.1 | 17852 | 17852 | Colon array | 696-755 |
| DEX0488_027.nt.1 | 17853 | 17853 | Colon array | 656-715 |
| DEX0488_027.nt.1 | 18644 | 18644 | Breast array | 696-755 |
| DEX0488_027.nt.1 | 18645 | 18645.2 | Breast array | 656-715 |
| DEX0488_027.nt.1 | 41955 | 41955.2 | Multi-cancer array | 525-584 |
| DEX0488_027.nt.1 | 41956 | 41956 | Multi-cancer array | 525-584 |
| DEX0488_027.nt.2 | 112185 | A_23_P169437 | UniDEX1 array | 129-188 |
| DEX0488_027.nt.2 | 15783 | 15783 | Breast array | 259-318 |
| DEX0488_027.nt.2 | 17852 | 17852 | Colon array | 139-198 |
| DEX0488_027.nt.2 | 17853 | 17853 | Colon array | 99-158 |
| DEX0488_027.nt.2 | 18644 | 18644 | Breast array | 139-198 |
| DEX0488_027.nt.2 | 18645 | 18645.2 | Breast array | 99-158 |
| DEX0488_027.nt.3 | 112185 | A_23_P169437 | UniDEX1 array | 90-149 |
| DEX0488_027.nt.3 | 15783 | 15783 | Breast array | 220-279 |
| DEX0488_027.nt.3 | 17852 | 17852 | Colon array | 100-159 |
| DEX0488_027.nt.3 | 17853 | 17853 | Colon array | 60-119 |
| DEX0488_027.nt.3 | 18644 | 18644 | Breast array | 100-159 |
| DEX0488_027.nt.3 | 18645 | 18645.2 | Breast array | 60-119 |
| DEX0488_027.nt.4 | 112185 | A_23_P169437 | UniDEX1 array | 148-207 |
| DEX0488_027.nt.4 | 15783 | 15783 | Breast array | 278-337 |
| DEX0488_027.nt.4 | 17852 | 17852 | Colon array | 158-217 |
| DEX0488_027.nt.4 | 17853 | 17853 | Colon array | 118-177 |
| DEX0488_027.nt.4 | 18644 | 18644 | Breast array | 158-217 |
| DEX0488_027.nt.4 | 18645 | 18645.2 | Breast array | 118-177 |
| DEX0488_028.nt.1 | 113172 | A_23_P5211 | UniDEX1 array | 1079-1138 |
| DEX0488_028.nt.1 | 92327 | 92327.02 | Ovary1 array | 1317-1376 |
| DEX0488_028.nt.1 | 27321 | 27321 | Breast array | 59-118 |
| DEX0488_028.nt.1 | 33088 | 33088 | Breast array | 59-118 |
| DEX0488_029.nt.1 | 123352 | A_23_P158725 | UniDEX1 array | 274-333 |
| DEX0488_029.nt.1 | 79635 | 79635 | Multi-cancer array | 129-188 |
| DEX0488_030.nt.1 | 119264 | A_23_P254917 | UniDEX1 array | 76-135 |
| DEX0488_030.nt.1 | 35317 | 35317 | Colon array | 427-486 |
| DEX0488_031.nt.1 | 25814 | 25814 | Breast array | 4773-4832 |
| DEX0488_031.nt.1 | 25815 | 25815 | Breast array | 4733-4792 |
| DEX0488_031.nt.1 | 110193 | A_23_P215944 | UniDEX1 array | 5245-5304 |
| DEX0488_031.nt.1 | 78587 | 78587 | Multi-cancer array | 5062-5121 |
| DEX0488_031.nt.1 | 78588 | 78588 | Multi-cancer array | 5082-5141 |
| DEX0488_032.nt.1 | 22205 | 22205 | Breast array | 589-648 |
| DEX0488_032.nt.1 | 78711 | 78711 | Multi-cancer array | 578-637 |
| DEX0488_032.nt.1 | 78712 | 78712 | Multi-cancer array | 558-617 |
| DEX0488_033.nt.1 | 106952 | A_23_P85570 | UniDEX1 array | 1150-1209 |
| DEX0488_033.nt.1 | 79019 | 79019 | Multi-cancer array | 974-1033 |
| DEX0488_033.nt.1 | 79020 | 79020 | Multi-cancer array | 973-1032 |
| DEX0488_033.nt.2 | 35814 | 35814.01 | Prostate2 array | 145-204 |
| DEX0488_033.nt.2 | 106952 | A_23_P85570 | UniDEX1 array | 1283-1342 |
| DEX0488_033.nt.2 | 79019 | 79019 | Multi-cancer array | 1107-1166 |
| DEX0488_033.nt.2 | 79020 | 79020 | Multi-cancer array | 1106-1165 |
| DEX0488_034.nt.1 | 111312 | A_23_P99386 | UniDEX1 array | 1012-1071 |
| DEX0488_034.nt.1 | 90123 | 90123 | Multi-cancer array | 1533-1592 |
| DEX0488_034.nt.1 | 90124 | 90124 | Multi-cancer array | 1513-1572 |
| DEX0488_035.nt.1 | 110700 | A_23_P30254 | UniDEX1 array | 3633-3692 |
| DEX0488_035.nt.1 | 8877 | 8877 | Breast array | 2152-2211 |
| DEX0488_035.nt.1 | 20561 | 20561 | Breast array | 3737-3796 |
| DEX0488_035.nt.1 | 41514 | 41514 | Breast array | 2416-2475 |
| DEX0488_035.nt.1 | 79903 | 79903 | Multi-cancer array | 3190-3249 |
| DEX0488_035.nt.1 | 79904 | 79904 | Multi-cancer array | 3170-3229 |
| DEX0488_035.nt.2 | 110700 | A_23_P30254 | UniDEX1 array | 3606-3665 |
| DEX0488_035.nt.2 | 8877 | 8877 | Breast array | 2125-2184 |
| DEX0488_035.nt.2 | 20561 | 20561 | Breast array | 3710-3769 |
| DEX0488_035.nt.2 | 41514 | 41514 | Breast array | 2389-2448 |
| DEX0488_035.nt.2 | 79903 | 79903 | Multi-cancer array | 3163-3222 |
| DEX0488_035.nt.2 | 79904 | 79904 | Multi-cancer array | 3143-3202 |
| DEX0488_036.nt.1 | 114035 | A_23_P101992 | UniDEX1 array | 1215-1274 |
| DEX0488_036.nt.1 | 3976 | 3976 | Multi-cancer array | 1215-1274 |
| DEX0488_036.nt.1 | 3977 | 3977 | Multi-cancer array | 1139-1198 |
| DEX0488_036.nt.2 | 114035 | A_23_P101992 | UniDEX1 array | 1317-1376 |
| DEX0488_036.nt.2 | 3976 | 3976 | Multi-cancer array | 1317-1376 |
| DEX0488_036.nt.2 | 3977 | 3977 | Multi-cancer array | 1241-1300 |

### Example 2b

### Relative Quantitation of Gene Expression

[0523] Real-Time quantitative PCR with fluorescent Taqman® probes is a quantitation detection system utilizing the 5′-3′ nuclease activity of Taq DNA polymerase. The method uses an internal fluorescent oligonucleotide probe (Taqman®) labeled with a 5′ reporter dye and a downstream, 3′ quencher dye. During PCR, the 5′-3′ nuclease activity of Taq DNA polymerase releases the reporter, whose fluorescence can then be detected by the laser detector of the Model 7700 Sequence Detection System (PE Applied Biosystems, Foster City, Calif., USA). Amplification of an endogenous control is used to standardize the amount of sample RNA added to the reaction and normalize for Reverse Transcriptase (RT) efficiency. Either cyclophilin, glyceraldehyde-3-phosphate dehydrogenase (GAPDH), ATPase, or 18S ribosomal RNA (rRNA) is used as this endogenous control. To calculate relative quantitation between all the samples studied, the target RNA levels for one sample were used as the basis for comparative results (calibrator). Quantitation relative to the “calibrator” can be obtained using the comparative method (User Bulletin #2: ABI PRISM 7700 Sequence Detection System).

[0524] The tissue distribution and the level of the target gene are evaluated for every sample in normal and cancer tissues. Total RNA is extracted from normal tissues, cancer tissues, and from cancers and the corresponding matched adjacent tissues. Subsequently, first strand cDNA is prepared with reverse transcriptase and the polymerase chain reaction is done using primers and Taqman® probes specific to each target gene. The results are analyzed using the ABI PRISM 7700 Sequence Detector. The absolute numbers are relative levels of expression of the target gene in a particular tissue compared to the calibrator tissue.

[0525] One of ordinary skill can design appropriate primers. The relative levels of expression of the OSNA versus normal tissues and other cancer tissues can then be determined. All the values are compared to the calibrator. Normal RNA samples are commercially available pools, originated by pooling samples of a particular tissue from different individuals.

[0526] The relative levels of expression of the OSNA in pairs of matched samples may also be determined. A matched pair is formed by mRNA from the cancer sample for a particular tissue and mRNA from the normal adjacent sample for that same tissue from the same individual. All the values are compared to the calibrator.

[0527] In the analysis of matching samples, the OSNAs show a high degree of tissue specificity for the tissue of interest. These results confirm the tissue specificity results obtained with normal pooled samples. Further, the level of mRNA expression in cancer samples and the isogenic normal adjacent tissue from the same individual are compared. This comparison provides an indication of specificity for the cancer state (e.g. higher levels of mRNA expression in the cancer sample compared to the normal adjacent).

[0528] Information on the samples tested in the QPCR experiments include the Sample ID (Smpl ID), Organ, Tissue Type (Tiss Type), Diagnosis (DIAG), Disease Detail, and Stage or Grade (STG or GRD) in following table.

Conclusions

[0529] Altogether, the high level of tissue specificity, plus the mRNA overexpression in matched samples tested are indicative of SEQ ID NO: 1-100 being a diagnostic marker and/or a therapeutic target for cancer.

### Example 3

### Protein Expression

[0530] The OSNA is amplified by polymerase chain reaction (PCR) and the amplified DNA fragment encoding the OSNA is subcloned in pET-21d for expression in E. coli. In addition to the OSNA coding sequence, codons for two amino acids, Met-Ala, flanking the NH₂-terminus of the coding sequence of OSNA, and six histidines, flanking the COOH-terminus of the coding sequence of OSNA, are incorporated to serve as initiating Met/restriction site and purification tag, respectively.

[0531] An over-expressed protein band of the appropriate molecular weight may be observed on a Coomassie blue stained polyacrylamide gel. This protein band is confirmed by Western blot analysis using monoclonal antibody against 6× Histidine tag.

[0532] Large-scale purification of OSP is achieved using cell paste generated from 6-liter bacterial cultures, and purified using immobilized metal affinity chromatography (IMAC). Soluble fractions that are separated from total cell lysate were incubated with a nickel chelating resin. The column is packed and washed with five column volumes of wash buffer. OSP is eluted stepwise with various concentration imidazole buffers.

### Example 4

### Fusion Proteins

[0533] The human Fc portion of the IgG molecule can be PCR amplified, using primers that span the 5′ and 3′ ends of the sequence described below. These primers also should have convenient restriction enzyme sites that will facilitate cloning into an expression vector, preferably a mammalian expression vector. For example, if pC4 (Accession No. 209646) is used, the human Fc portion can be ligated into the BamHI cloning site. Note that the 3′ BamHI site should be destroyed. Next, the vector containing the human Fc portion is re-restricted with BamHI, linearizing the vector, and a polynucleotide of the present invention, isolated by the PCR protocol described in Example 2, is ligated into this BamHI site. Note that the polynucleotide is cloned without a stop codon, otherwise a fusion protein will not be produced. If the naturally occurring signal sequence is used to produce the secreted protein, pC4 does not need a second signal peptide. Alternatively, if the naturally occurring signal sequence is not used, the vector can be modified to include a heterologous signal sequence. See, e.g., WO 96/34891.

### Example 5

### Production of an Antibody from a Polypeptide

[0534] In general, such procedures involve immunizing an animal (preferably a mouse) with polypeptide or, more preferably, with a secreted polypeptide-expressing cell. Such cells may be cultured in any suitable tissue culture medium; however, it is preferable to culture cells in Earle's modified Eagle's medium supplemented with 10% fetal bovine serum (inactivated at about 56° C.), and supplemented with about 10 g/l of nonessential amino acids, about 1,000 U/ml of penicillin, and about 100, μg/ml of streptomycin. The splenocytes of such mice are extracted and fused with a suitable myeloma cell line. Any suitable myeloma cell line may be employed in accordance with the present invention; however, it is preferable to employ the parent myeloma cell line (SP20), available from the ATCC. After fusion, the resulting hybridoma cells are selectively maintained in HAT medium, and then cloned by limiting dilution as described by Wands et al., Gastroenterology 80: 225-232 (1981).

[0535] The hybridoma cells obtained through such a selection are then assayed to identify clones which secrete antibodies capable of binding the polypeptide. Alternatively, additional antibodies capable of binding to the polypeptide can be produced in a two-step procedure using anti-idiotypic antibodies. Such a method makes use of the fact that antibodies are themselves antigens, and therefore, it is possible to obtain an antibody which binds to a second antibody. In accordance with this method, protein specific antibodies are used to immunize an animal, preferably a mouse. The splenocytes of such an animal are then used to produce hybridoma cells, and the hybridoma cells are screened to identify clones which produce an antibody whose ability to bind to the protein-specific antibody can be blocked by the polypeptide. Such antibodies comprise anti-idiotypic antibodies to the protein specific antibody and can be used to immunize an animal to induce formation of further protein-specific antibodies.

### Example 6

### Method of Determining Alterations in a Gene Corresponding to a Polynucleotide

[0536] RNA is isolated from individual patients or from a family of individuals that have a phenotype of interest. cDNA is then generated from these RNA samples using protocols known in the art. See, Sambrook (2001), supra. The cDNA is then used as a template for PCR, employing primers surrounding regions of interest in SEQ ID NO: 1-100.

[0537] Suggested PCR conditions consist of 35 cycles at 95° C. for 30 seconds; 60-120 seconds at 52-58° C.; and 60-120 seconds at 70° C., using buffer solutions described in Sidransky et al., Science 252(5006): 706-9 (1991). See also Sidransky et al., Science 278(5340): 1054-9 (1997).

[0538] PCR products are then sequenced using primers labeled at their 5′ end with T4 polynucleotide kinase, employing SequiTherm Polymerase. (Epicentre Technologies). The intron-exon borders of selected exons are also determined and genomic PCR products analyzed to confirm the results. PCR products harboring suspected mutations are then cloned and sequenced to validate the results of the direct sequencing. PCR products is cloned into T-tailed vectors as described in Holton et al., Nucleic Acids Res., 19: 1156 (1991) and sequenced with T7 polymerase (U.S. Biochemical). Affected individuals are identified by mutations not present in unaffected individuals.

[0539] Genomic rearrangements may also be determined. Genomic clones are nick-translated with digoxigenin deoxyuridine 5′ triphosphate (Boehringer Manheim), and FISH is performed as described in Johnson et al., Methods Cell Biol. 35: 73-99 (1991). Hybridization with the labeled probe is carried out using a vast excess of human cot-1 DNA for specific hybridization to the corresponding genomic locus.

[0540] Chromosomes are counterstained with 4,6-diamino-2-phenylidole and propidium iodide, producing a combination of C- and R-bands. Aligned images for precise mapping are obtained using a triple-band filter set (Chroma Technology, Brattleboro, Vt.) in combination with a cooled charge-coupled device camera (Photometrics, Tucson, Ariz.) and variable excitation wavelength filters. Johnson (1991). Image collection, analysis and chromosomal fractional length measurements are performed using the ISee Graphical Program System. (Inovision Corporation, Durham, N.C.) Chromosome alterations of the genomic region hybridized by the probe are identified as insertions, deletions, and translocations. These alterations are used as a diagnostic marker for an associated disease.

### Example 7

### Method of Detecting Abnormal Levels of a Polypeptide in a Biological Sample

[0541] Antibody-sandwich ELISAs are used to detect polypeptides in a sample, preferably a biological sample. Wells of a microtiter plate are coated with specific antibodies, at a final concentration of 0.2 to 10 μg/ml. The antibodies are either monoclonal or polyclonal and are produced by the method described above. The wells are blocked so that non-specific binding of the polypeptide to the well is reduced. The coated wells are then incubated for >2 hours at RT with a sample containing the polypeptide. Preferably, serial dilutions of the sample should be used to validate results. The plates are then washed three times with deionized or distilled water to remove unbound polypeptide. Next, 50 μl of specific antibody-alkaline phosphatase conjugate, at a concentration of 25-400 ng, is added and incubated for 2 hours at room temperature. The plates are again washed three times with deionized or distilled water to remove unbound conjugate. 75 μl of 4-methylumbelliferyl phosphate (MUP) or p-nitrophenyl phosphate (NPP) substrate solution are added to each well and incubated 1 hour at room temperature.

[0542] The reaction is measured by a microtiter plate reader. A standard curve is prepared, using serial dilutions of a control sample, and polypeptide concentrations are plotted on the X-axis (log scale) and fluorescence or absorbance on the Y-axis (linear scale). The concentration of the polypeptide in the sample is calculated using the standard curve.

### Example 8

### Formulating a Polypeptide

[0543] The secreted polypeptide composition will be formulated and dosed in a fashion consistent with good medical practice, taking into account the clinical condition of the individual patient (especially the side effects of treatment with the secreted polypeptide alone), the site of delivery, the method of administration, the scheduling of administration, and other factors known to practitioners. The “effective amount” for purposes herein is thus determined by such considerations.

[0544] As a general proposition, the total pharmaceutically effective amount of secreted polypeptide administered parenterally per dose will be in the range of about 1, μg/kg/day to 10 mg/kg/day of patient body weight, although, as noted above, this will be subject to therapeutic discretion. More preferably, this dose is at least 0.01 mg/kg/day, and most preferably for humans between about 0.01 and 1 mg/kg/day for the hormone. If given continuously, the secreted polypeptide is typically administered at a dose rate of about 1 μg/kg/hour to about 50 mg/kg/hour, either by 1-4 injections per day or by continuous subcutaneous infusions, for example, using a mini-pump. An intravenous bag solution may also be employed. The length of treatment needed to observe changes and the interval following treatment for responses to occur appears to vary depending on the desired effect.

[0545] Pharmaceutical compositions containing the secreted protein of the invention are administered orally, rectally, parenterally, intracistemally, intravaginally, intraperitoneally, topically (as by powders, ointments, gels, drops or transdermal patch), bucally, or as an oral or nasal spray. “Pharmaceutically acceptable carrier” refers to a non-toxic solid, semisolid or liquid filler, diluent, encapsulating material or formulation auxiliary of any type. The term “parenteral” as used herein refers to modes of administration which include intravenous, intramuscular, intraperitoneal, intrastemal, subcutaneous and intraarticular injection and infusion.

[0546] The secreted polypeptide is also suitably administered by sustained-release systems. Suitable examples of sustained-release compositions include semipermeable polymer matrices in the form of shaped articles, e.g., films, or microcapsules. Sustained-release matrices include polylactides (U.S. Pat. No.3,773,919, EP 58,481, the contents of which are hereby incorporated by reference herein in their entirety), copolymers of L-glutamic acid and gamma-ethyl-L-glutamate (Sidman, U. et al., Biopolymers 22: 547-556 (1983)), poly (2-hydroxyethyl methacrylate) (R. Langer et al., J. Biomed. Mater. Res. 15: 167-277 (1981), and R. Langer, Chem. Tech. 12: 98-105 (1982)), ethylene vinyl acetate (R. Langer et al.) or poly-D-(−)-3-hydroxybutyric acid (EP.133,988). Sustained-release compositions also include liposomally entrapped polypeptides. Liposomes containing the secreted polypeptide are prepared by methods known per se: DE Epstein et al., Proc. Natl. Acad. Sci. USA 82: 3688-3692 (1985); Hwang et al., Proc. Natl. Acad. Sci. USA 77: 4030-4034 (1980); EP 52,322; EP 36,676; EP 88,046; EP 143,949; EP 142,641; Japanese Pat. Appl. 83-118008; U.S. Pat. Nos. 4,485,045 and 4,544,545; and EP 102,324, the contents of which are hereby incorporated by reference herein in their entirety. Ordinarily, the liposomes are of the small (about 200-800 Angstroms) unilamellar type in which the lipid content is greater than about 30 mol. percent cholesterol, the selected proportion being adjusted for the optimal secreted polypeptide therapy.

[0547] For parenteral administration, in one embodiment, the secreted polypeptide is formulated generally by mixing it at the desired degree of purity, in a unit dosage injectable form (solution, suspension, or emulsion), with a pharmaceutically acceptable carrier, i.e., one that is non-toxic to recipients at the dosages and concentrations employed and is compatible with other ingredients of the formulation.

[0548] For example, the formulation preferably does not include oxidizing agents and other compounds that are known to be deleterious to polypeptides. Generally, the formulations are prepared by contacting the polypeptide uniformly and intimately with liquid carriers or finely divided solid carriers or both. Then, if necessary, the product is shaped into the desired formulation. Preferably, the carrier is a parenteral carrier, more preferably, a solution that is isotonic with the blood of the recipient. Examples of such carrier vehicles include water, saline, Ringer's solution, and dextrose solution. Non-aqueous vehicles such as fixed oils and ethyl oleate are also useful herein, as well as liposomes.

[0549] The carrier suitably contains minor amounts of additives such as substances that enhance isotonicity and chemical stability. Such materials are non-toxic to recipients at the dosages and concentrations employed, and include buffers such as phosphate, citrate, succinate, acetic acid, and other organic acids or their salts; antioxidants such as ascorbic acid; low molecular weight (less than about ten residues) polypeptides, e. g., polyarginine or tripeptides; proteins, such as serum albumin, gelatin, or immunoglobulins; hydrophilic polymers such as polyvinylpyrrolidone; amino acids, such as glycine, glutamic acid, aspartic acid, or arginine; monosaccharides, disaccharides, and other carbohydrates including cellulose or its derivatives, glucose, mannose, or dextrins; chelating agents such as EDTA; sugar alcohols such as mannitol or sorbitol; counterions such as sodium; and/or nonionic surfactants such as polysorbates, poloxamers, or PEG.

[0550] The secreted polypeptide is typically formulated in such vehicles at a concentration of about 0.1 mg/ml to 100 mg/ml, preferably 1-10 mg/ml, at a pH of about 3 to 8. It will be understood that the use of certain of the foregoing excipients, carriers, or stabilizers will result in the formation of polypeptide salts.

[0551] Any polypeptide to be used for therapeutic administration can be sterile. Sterility is readily accomplished by filtration through sterile filtration membranes (e.g., 0.2 micron membranes). Therapeutic polypeptide compositions generally are placed into a container having a sterile access port, for example, an intravenous solution bag or vial having a stopper pierceable by a hypodermic injection needle.

[0552] Polypeptides ordinarily will be stored in unit or multi-dose containers, for example, sealed ampules or vials, as an aqueous solution or as a lyophilized formulation for reconstitution. As an example of a lyophilized formulation, 10-ml vials are filled with 5 ml of sterile-filtered 1% (w/v) aqueous polypeptide solution, and the resulting mixture is lyophilized. The infusion solution is prepared by reconstituting the lyophilized polypeptide using bacteriostatic Water-for-Injection.

[0553] The invention also provides a pharmaceutical pack or kit comprising one or more containers filled with one or more of the ingredients of the pharmaceutical compositions of the invention. Associated with such container (s) can be a notice in the form prescribed by a governmental agency regulating the manufacture, use or sale of pharmaceuticals or biological products, which notice reflects approval by the agency of manufacture, use or sale for human administration. In addition, the polypeptides of the present invention may be employed in conjunction with other therapeutic compounds.

### Example 9

### Method of Treating Decreased Levels of the Polypeptide

[0554] It will be appreciated that conditions caused by a decrease in the standard or normal expression level of a secreted protein in an individual can be treated by administering the polypeptide of the present invention, preferably in the secreted form. Thus, the invention also provides a method of treatment of an individual in need of an increased level of the polypeptide comprising administering to such an individual a pharmaceutical composition comprising an amount of the polypeptide to increase the activity level of the polypeptide in such an individual.

[0555] For example, a patient with decreased levels of a polypeptide receives a daily dose 0.1-100 μg/kg of the polypeptide for six consecutive days. Preferably, the polypeptide is in the secreted form. The exact details of the dosing scheme, based on administration and formulation, are provided above.

### Example 10

### Method of Treating Increased Levels of the Polypeptide

[0556] Antisense or RNAi technology are used to inhibit production of a polypeptide of the present invention. This technology is one example of a method of decreasing levels of a polypeptide, preferably a secreted form, due to a variety of etiologies, such as cancer.

[0557] For example, a patient diagnosed with abnormally increased levels of a polypeptide is administered intravenously antisense polynucleotides at 0.5, 1.0, 1.5, 2.0 and 3.0 mg/kg day for 21 days. This treatment is repeated after a 7-day rest period if the treatment was well tolerated. The formulation of the antisense polynucleotide is provided above.

### Example 11

### Method of Treatment Using Gene Therapy

[0558] One method of gene therapy transplants fibroblasts, which are capable of expressing a polypeptide, onto a patient. Generally, fibroblasts are obtained from a subject by skin biopsy. The resulting tissue is placed in tissue-culture medium and separated into small pieces. Small chunks of the tissue are placed on a wet surface of a tissue culture flask, approximately ten pieces are placed in each flask. The flask is turned upside down, closed tight and left at room temperature over night. After 24 hours at room temperature, the flask is inverted and the chunks of tissue remain fixed to the bottom of the flask and fresh media (e. g., Ham's F12 media, with 10% FBS, penicillin and streptomycin) is added. The flasks are then incubated at 37° C. for approximately one week.

[0559] At this time, fresh media is added and subsequently changed every several days. After an additional two weeks in culture, a monolayer of fibroblasts emerge. The monolayer is trypsinized and scaled into larger flasks. pMV-7 (Kirschmeier, P. T. et al., DNA, 7: 219-25 (1988)), flanked by the long terminal repeats of the Moloney murine sarcoma virus, is digested with EcoRI and HindIII and subsequently treated with calf intestinal phosphatase. The linear vector is fractionated on agarose gel and purified, using glass beads.

[0560] The cDNA encoding a polypeptide of the present invention can be amplified using PCR primers which correspond to the 5′ and 3′ end sequences respectively as set forth in Example 3. Preferably, the 5′ primer contains an EcoRI site and the 3′ primer includes a HindIII site. Equal quantities of the Moloney murine sarcoma virus linear backbone and the amplified EcoRI and HindIII fragment are added together, in the presence of T4 DNA ligase. The resulting mixture is maintained under conditions appropriate for ligation of the two fragments. The ligation mixture is then used to transform bacteria HB 101, which are then plated onto agar containing kanamycin for the purpose of confirming that the vector has the gene of interest properly inserted.

[0561] The amphotropic pA317 or GP+am12 packaging cells are grown in tissue culture to confluent density in Dulbecco's Modified Eagles Medium (DMEM) with 10% calf serum (CS), penicillin and streptomycin. The MSV vector containing the gene is then added to the media and the packaging cells transduced with the vector. The packaging cells now produce infectious viral particles containing the gene (the packaging cells are now referred to as producer cells).

[0562] Fresh media is added to the transduced producer cells, and subsequently, the media is harvested from a 10 cm plate of confluent producer cells. The spent media, containing the infectious viral particles, is filtered through a millipore filter to remove detached producer cells and this media is then used to infect fibroblast cells. Media is removed from a sub-confluent plate of fibroblasts and quickly replaced with the media from the producer cells. This media is removed and replaced with fresh media.

[0563] If the titer of virus is high, then virtually all fibroblasts will be infected and no selection is required. If the titer is very low, then it is necessary to use a retroviral vector that has a selectable marker, such as neo or his. Once the fibroblasts have been efficiently infected, the fibroblasts are analyzed to determine whether protein is produced.

[0564] The engineered fibroblasts are then transplanted onto the host, either alone or after having been grown to confluence on cytodex 3 microcarrier beads.

### Example 12

### Method of Treatment Using Gene Therapy-In Vivo

[0565] Another aspect of the present invention is using in vivo gene therapy methods to treat disorders, diseases and conditions. The gene therapy method relates to the introduction of naked nucleic acid (DNA, RNA, and antisense DNA or RNA) sequences into an animal to increase or decrease the expression of the polypeptide.

[0566] The polynucleotide of the present invention may be operatively linked to a promoter or any other genetic elements necessary for the expression of the polypeptide by the target tissue. Such gene therapy and delivery techniques and methods are known in the art, see, for example, Tabata H. et al. Cardiovasc. Res. 35 (3): 470-479 (1997); Chao J et al. Pharmacol. Res. 35 (6): 517-522 (1997); Wolff J. A. Neuromuscul. Disord. 7 (5): 314-318 (1997), Schwartz B. et al. Gene Ther. 3 (5): 405-411 (1996); and Tsurumi Y. et al. Circulation 94 (12): 3281-3290 (1996); WO 90/11092, WO 98/11779; U.S. Pat. Nos. 5,693,622; 5,705,151; 5,580,859, the contents of which are hereby incorporated by reference herein in their entirety.

[0567] The polynucleotide constructs may be delivered by any method that delivers injectable materials to the cells of an animal, such as, injection into the interstitial space of tissues (heart, muscle, skin, ovarian, liver, intestine and the like). The polynucleotide constructs can be delivered in a pharmaceutically acceptable liquid or aqueous carrier.

[0568] The term “naked”polynucleotide, DNA or RNA, refers to sequences that are free from any delivery vehicle that acts to assist, promote, or facilitate entry into the cell, including viral sequences, viral particles, liposome formulations, lipofectin or precipitating agents and the like. However, the polynucleotides of the present invention may also be delivered in liposome formulations (such as those taught in Felgner P. L. et al. Ann. NY Acad. Sci. 772: 126-139 (1995) and Abdallah B. et al. Biol. Cell 85 (1): 1-7 (1995)) which can be prepared by methods well known to those skilled in the art.

[0569] The polynucleotide vector constructs used in the gene therapy method are preferably constructs that will not integrate into the host genome nor will they contain sequences that allow for replication. Any strong promoter known to those skilled in the art can be used for driving the expression of DNA. Unlike other gene therapies techniques, one major advantage of introducing naked nucleic acid sequences into target cells is the transitory nature of the polynucleotide synthesis in the cells. Studies have shown that non-replicating DNA sequences can be introduced into cells to provide production of the desired polypeptide for periods of up to six months.

[0570] The polynucleotide construct can be delivered to the interstitial space of tissues within the an animal, including of muscle, skin, brain, ovarian, liver, spleen, bone marrow, thymus, heart, lymph, blood, bone, cartilage, pancreas, kidney, gall bladder, stomach, intestine, testis, ovary, uterus, rectum, nervous system, eye, gland, and connective tissue. Interstitial space of the tissues comprises the intercellular fluid, mucopolysaccharide matrix among the reticular fibers of organ tissues, elastic fibers in the walls of vessels or chambers, collagen fibers of fibrous tissues, or that same matrix within connective tissue ensheathing muscle cells or in the lacunae of bone. It is similarly the space occupied by the plasma of the circulation and the lymph fluid of the lymphatic channels. Delivery to the interstitial space of muscle tissue is preferred for the reasons discussed below. They may be conveniently delivered by injection into the tissues comprising these cells. They are preferably delivered to and expressed in persistent, non-dividing cells which are differentiated, although delivery and expression may be achieved in non-differentiated or less completely differentiated cells, such as, for example, stem cells of blood or skin fibroblasts. In vivo muscle cells are particularly competent in their ability to take up and express polynucleotides.

[0571] For the naked polynucleotide injection, an effective dosage amount of DNA or RNA will be in the range of from about 0.05 μg/kg body weight to about 50 mg/kg body weight. Preferably the dosage will be from about 0.005 mg/kg to about 20 mg/kg and more preferably from about 0.05 mg/kg to about 5 mg/kg. Of course, as the artisan of ordinary skill will appreciate, this dosage will vary according to the tissue site of injection. The appropriate and effective dosage of nucleic acid sequence can readily be determined by those of ordinary skill in the art and may depend on the condition being treated and the route of administration. The preferred route of administration is by the parenteral route of injection into the interstitial space of tissues. However, other parenteral routes may also be used, such as, inhalation of an aerosol formulation particularly for delivery to ovarian or bronchial tissues, throat or mucous membranes of the nose. In addition, naked polynucleotide constructs can be delivered to arteries during angioplasty by the catheter used in the procedure.

[0572] The dose response effects of injected polynucleotide in muscle in vivo is determined as follows. Suitable template DNA for production of mRNA coding for polypeptide of the present invention is prepared in accordance with a standard recombinant DNA methodology. The template DNA, which may be either circular or linear, is either used as naked DNA or complexed with liposomes. The quadriceps muscles of mice are then injected with various amounts of the template DNA.

[0573] Five to six week old female and male Balb/C mice are anesthetized by intraperitoneal injection with 0.3 ml of 2.5% Avertin. A 1.5 cm incision is made on the anterior thigh, and the quadriceps muscle is directly visualized. The template DNA is injected in 0.1 ml of carrier in a 1 cc syringe through a 27 gauge needle over one minute, approximately 0.5 cm from the distal insertion site of the muscle into the knee and about 0.2 cm deep. A suture is placed over the injection site for future localization, and the skin is closed with stainless steel clips.

[0574] After an appropriate incubation time (e.g., 7 days) muscle extracts are prepared by excising the entire quadriceps. Every fifth 15 um cross-section of the individual quadriceps muscles is histochemically stained for protein expression. A time course for protein expression may be done in a similar fashion except that quadriceps from different mice are harvested at different times. Persistence of DNA in muscle following injection may be determined by Southern blot analysis after preparing total cellular DNA and HIRT supernatants from injected and control mice.

[0575] The results of the above experimentation in mice can be use to extrapolate proper dosages and other treatment parameters in humans and other animals using naked DNA.

### Example 13

### Transgenic Animals

[0576] The polypeptides of the invention can also be expressed in transgenic animals. Animals of any species, including, but not limited to, mice, rats, rabbits, hamsters, guinea pigs, pigs, micro-pigs, goats, sheep, cows and non-human primates, e. g., baboons, monkeys, and chimpanzees may be used to generate transgenic animals. In a specific embodiment, techniques described herein or otherwise known in the art, are used to express polypeptides of the invention in humans, as part of a gene therapy protocol.

[0577] Any technique known in the art may be used to introduce the transgene (I. e., polynucleotides of the invention) into animals to produce the founder lines of transgenic animals. Such techniques include, but are not limited to, pronuclear microinjection (Paterson et al., Appl. Microbiol. Biotechnol. 40: 691-698 (1994); Carver et al., Biotechnology 11: 1263-1270 (1993); Wright et al., Biotechnology 9: 830-834 (1991); and U.S. Pat. No. 4,873,191, the contents of which is hereby incorporated by reference herein in its entirety); retrovirus mediated gene transfer into germ lines (Van der Putten et al., Proc. Natl. Acad. Sci., USA 82: 6148-6152 (1985)), blastocysts or embryos; gene targeting in embryonic stem cells (Thompson et al., Cell 56: 313-321 (1989)); electroporation of cells or embryos (Lo, 1983, Mol Cell. Biol. 3: 1803-1814 (1983)); introduction of the polynucleotides of the invention using a gene gun (see, e. g., Ulmer et al., Science 259: 1745 (1993); introducing nucleic acid constructs into embryonic pleuripotent stem cells and transferring the stem cells back into the blastocyst; and sperm mediated gene transfer (Lavitrano et al., Cell 57: 717-723 (1989). For a review of such techniques, see Gordon, “Transgenic Animals,” Intl. Rev. Cytol. 115: 171-229 (1989).

[0578] Any technique known in the art may be used to produce transgenic clones containing polynucleotides of the invention, for example, nuclear transfer into enucleated oocytes of nuclei from cultured embryonic, fetal, or adult cells induced to quiescence (Campell et al., Nature 380: 64-66 (1996); Wilmut et al., Nature 385: 810813 (1997)).

[0579] The present invention provides for transgenic animals that carry the transgene in all their cells, as well as animals which carry the transgene in some, but not all their cells, I. e., mosaic animals or chimeric. The transgene may be integrated as a single transgene or as multiple copies such as in concatamers, e.g., head-to-head tandems or head-to-tail tandems. The transgene may also be selectively introduced into and activated in a particular cell type by following, for example, the teaching of Lasko et al. (Lasko et al., Proc. Natl. Acad. Sci. USA 89: 6232-6236 (1992)). The regulatory sequences required for such a cell-type specific activation will depend upon the particular cell type of interest, and will be apparent to those of skill in the art. When it is desired that the polynucleotide transgene be integrated into the chromosomal site of the endogenous gene, gene targeting is preferred. Briefly, when such a technique is to be utilized, vectors containing some nucleotide sequences homologous to the endogenous gene are designed for the purpose of integrating, via homologous recombination with chromosomal sequences, into and disrupting the function of the nucleotide sequence of the endogenous gene. The transgene may also be selectively introduced into a particular cell type, thus inactivating the endogenous gene in only that cell type, by following, for example, the teaching of Gu et al. (Gu et al., Science 265: 103-106 (1994)). The regulatory sequences required for such a cell-type specific inactivation will depend upon the particular cell type of interest, and will be apparent to those of skill in the art.

[0580] Once transgenic animals have been generated, the expression of the recombinant gene may be assayed utilizing standard techniques. Initial screening may be accomplished by Southern blot analysis or PCR techniques to analyze animal tissues to verify that integration of the transgene has taken place. The level of mRNA expression of the transgene in the tissues of the transgenic animals may also be assessed using techniques which include, but are not limited to, Northern blot analysis of tissue samples obtained from the animal, in situ hybridization analysis, and reverse transcriptase-PCR (rt-PCR). Samples of transgenic gene-expressing tissue may also be evaluated immunocytochemically or immunohistochemically using antibodies specific for the transgene product.

[0581] Once the founder animals are produced, they may be bred, inbred, outbred, or crossbred to produce colonies of the particular animal. Examples of such breeding strategies include, but are not limited to: outbreeding of founder animals with more than one integration site in order to establish separate lines; inbreeding of separate lines in order to produce compound transgenics that express the transgene at higher levels because of the effects of additive expression of each transgene; crossing of heterozygous transgenic animals to produce animals homozygous for a given integration site in order to both augment expression and eliminate the need for screening of animals by DNA analysis; crossing of separate homozygous lines to produce compound heterozygous or homozygous lines; and breeding to place the transgene on a distinct background that is appropriate for an experimental model of interest.

[0582] Transgenic animals of the invention have uses which include, but are not limited to, animal model systems useful in elaborating the biological function of polypeptides of the present invention, studying conditions and/or disorders associated with aberrant expression, and in screening for compounds effective in ameliorating such conditions and/or disorders.

### Example 14

### Knock-Out Animals

[0583] Endogenous gene expression can also be reduced by inactivating or “knocking out” the gene and/or its promoter using targeted homologous recombination. (E. g., see Smithies et al., Nature 317: 230-234 (1985); Thomas & Capecchi, Cell 51: 503512 (1987); Thompson et al., Cell 5:313-321 (1989)) Alternatively, RNAi technology may be used. For example, a mutant, non-functional polynucleotide of the invention (or a completely unrelated DNA sequence) flanked by DNA homologous to the endogenous polynucleotide sequence (either the coding regions or regulatory regions of the gene) can be used, with or without a selectable marker and/or a negative selectable marker, to transfect cells that express polypeptides of the invention in vivo. In another embodiment, techniques known in the art are used to generate knockouts in cells that contain, but do not express the gene of interest. Insertion of the DNA construct, via targeted homologous recombination, results in inactivation of the targeted gene. Such approaches are particularly suited in research and agricultural fields where modifications to embryonic stem cells can be used to generate animal offspring with an inactive targeted gene (e. g., see Thomas & Capecchi 1987 and Thompson 1989, supra). However, this approach can be routinely adapted for use in humans provided the recombinant DNA constructs are directly administered or targeted to the required site in vivo using appropriate viral vectors that will be apparent to those of skill in the art.

[0584] In further embodiments of the invention, cells that are genetically engineered to express the polypeptides of the invention, or alternatively, that are genetically engineered not to express the polypeptides of the invention (e. g., knockouts) are administered to a patient in vivo. Such cells may be obtained from the patient (i.e., animal, including human) or an MHC compatible donor and can include, but are not limited to fibroblasts, bone marrow cells, blood cells (e. g., lymphocytes), adipocytes, muscle cells, endothelial cells etc. The cells are genetically engineered in vitro using recombinant DNA techniques to introduce the coding sequence of polypeptides of the invention into the cells, or alternatively, to disrupt the coding sequence and/or endogenous regulatory sequence associated with the polypeptides of the invention, e.g., by transduction (using viral vectors, and preferably vectors that integrate the transgene into the cell genome) or transfection procedures, including, but not limited to, the use of plasmids, cosmids, YACs, naked DNA, electroporation, liposomes, etc.

[0585] The coding sequence of the polypeptides of the invention can be placed under the control of a strong constitutive or inducible promoter or promoter/enhancer to achieve expression, and preferably secretion, of the polypeptides of the invention. The engineered cells which express and preferably secrete the polypeptides of the invention can be introduced into the patient systemically, e. g., in the circulation, or intraperitoneally.

[0586] Alternatively, the cells can be incorporated into a matrix and implanted in the body, e. g., genetically engineered fibroblasts can be implanted as part of a skin graft; genetically engineered endothelial cells can be implanted as part of a lymphatic or vascular graft. (See, for example, Anderson et al. U.S. Pat. No. 5,399,349; and Mulligan & Wilson, U.S. Pat. No. 5,460,959, the contents of which are hereby incorporated by reference herein in their entirety).

[0587] When the cells to be administered are non-autologous or non-MHC compatible cells, they can be administered using well known techniques which prevent the development of a host immune response against the introduced cells. For example, the cells may be introduced in an encapsulated form which, while allowing for an exchange of components with the immediate extracellular environment, does not allow the introduced cells to be recognized by the host immune system.

[0588] Transgenic and “knock-out” animals of the invention have uses which include, but are not limited to, animal model systems useful in elaborating the biological function of polypeptides of the present invention, studying conditions and/or disorders associated with aberrant expression, and in screening for compounds effective in ameliorating such conditions and/or disorders.

[0589] While preferred illustrative embodiments of the present invention are described, one skilled in the art will appreciate that the present invention can be practiced by other than the described embodiments, which are presented for purposes of illustration only and not by way of limitation. The present invention is limited only by the claims that follow.

1. An isolated nucleic acid molecule comprising:
(a) a nucleic acid molecule comprising a nucleic acid sequence that encodes an amino acid sequence of SEQ ID NO: 101-240;
(b) a nucleic acid molecule comprising a nucleic acid sequence of SEQ ID NO: 1-100;
(c) a nucleic acid molecule that selectively hybridizes to the nucleic acid molecule of (a) or (b); or
(d) a nucleic acid molecule having at least 95% sequence identity to the nucleic acid molecule of (a) or (b).

2. The nucleic acid molecule according to claim 1, wherein the nucleic acid molecule is a cDNA.

3. The nucleic acid molecule according to claim 1, wherein the nucleic acid molecule is genomic DNA.

4. The nucleic acid molecule according to claim 1, wherein the nucleic acid molecule is an RNA.

5. The nucleic acid molecule according to claim 1, wherein the nucleic acid molecule is a mammalian nucleic acid molecule.

6. The nucleic acid molecule according to claim 5, wherein the nucleic acid molecule is a human nucleic acid molecule.

7. A method for determining the presence of a ovarian specific nucleic acid (OSNA) in a sample, comprising the steps of:
(a) contacting the sample with the nucleic acid molecule of SEQ ID NO: 1-100 under conditions in which the nucleic acid molecule will selectively hybridize to a ovarian specific nucleic acid; and
(b) detecting hybridization of the nucleic acid molecule to a OSNA in the sample, wherein the detection of the hybridization indicates the presence of a OSNA in the sample.

8. A vector comprising the nucleic acid molecule of claim 1.

9. A host cell comprising the vector according to claim 8.

10. A method for producing a polypeptide encoded by the nucleic acid molecule according to claim 1, comprising the steps of:
(a) providing a host cell comprising the nucleic acid molecule operably linked to one or more expression control sequences, and
(b) incubating the host cell under conditions in which the polypeptide is produced.

11. A polypeptide encoded by the nucleic acid molecule according to claim 1.

12. An isolated polypeptide selected from the group consisting of:
(a) a polypeptide comprising an amino acid sequence with at least 95% sequence identity to of SEQ ID NO: 101-240 ; or
(b) a polypeptide comprising an amino acid sequence encoded by a nucleic acid molecule having at least 95% sequence identity to a nucleic acid molecule comprising a nucleic acid sequence of SEQ ID NO: 1-100.

13. An antibody or fragment thereof that specifically binds to:
(a) a polypeptide comprising an amino acid sequence with at least 95% sequence identity to of SEQ ID NO: 101-240 ; or
(b) a polypeptide comprising an amino acid sequence encoded by a nucleic acid molecule having at least 95% sequence identity to a nucleic acid molecule comprising a nucleic acid sequence of SEQ ID NO: 1-100.

14. A method for determining the presence of a ovarian specific protein in a sample, comprising the steps of:
(a) contacting the sample with a suitable reagent under conditions in which the reagent will selectively interact with the ovarian specific protein comprising an amino acid sequence with at least 95% sequence identity to of SEQ ID NO: 101-240; and
(b) detecting the interaction of the reagent with a ovarian specific protein in the sample, wherein the detection of binding indicates the presence of a ovarian specific protein in the sample.

15. A method for diagnosing or monitoring the presence and metastases of ovarian cancer in a patient, comprising the steps of:
(a) determining an amount of:
(i) a nucleic acid molecule comprising a nucleic acid sequence that encodes an amino acid sequence of SEQ ID NO: 101-240;
(ii) a nucleic acid molecule comprising a nucleic acid sequence of SEQ ID NO: 1-100;
(iii) a nucleic acid molecule that selectively hybridizes to the nucleic acid molecule of (i) or (ii);
(iv) a nucleic acid molecule having at least 95% sequence identity to the nucleic acid molecule of (i) or (ii);
(v) a polypeptide comprising an amino acid sequence with at least 95% sequence identity to of SEQ ID NO: 101-240 ; or
(vi) a polypeptide comprising an amino acid sequence encoded by a nucleic acid molecule having at least 95% sequence identity to a nucleic acid molecule comprising a nucleic acid sequence of SEQ ID NO: 1-100 and;
(b) comparing the amount of the determined nucleic acid molecule or the polypeptide in the sample of the patient to the amount of the ovarian specific marker in a normal control; wherein a difference in the amount of the nucleic acid molecule or the polypeptide in the sample compared to the amount of the nucleic acid molecule or the polypeptide in the normal control is associated with the presence of ovarian cancer.

16. A kit for detecting a risk of cancer or presence of cancer in a patient, said kit comprising a means for determining the presence of:
(a) a nucleic acid molecule comprising a nucleic acid sequence that encodes an amino acid sequence of SEQ ID NO: 101-240;
(b) a nucleic acid molecule comprising a nucleic acid sequence of SEQ ID NO: 1-100;
(c) a nucleic acid molecule that selectively hybridizes to the nucleic acid molecule of (a) or (b); or
(d) a nucleic acid molecule having at least 95% sequence identity to the nucleic acid molecule of (a) or (b); or
(e) a polypeptide comprising an amino acid sequence with at least 95% sequence identity to of SEQ ID NO: 101-240 ; or
(f) a polypeptide comprising an amino acid sequence encoded by a nucleic acid molecule having at least 95% sequence identity to a nucleic acid molecule comprising a nucleic acid sequence of SEQ ID NO: 1-100.

17. A method of treating a patient with ovarian cancer, comprising the step of administering a composition consisting of:
(a) a nucleic acid molecule comprising a nucleic acid sequence that encodes an amino acid sequence of SEQ ID NO: 101-240;
(b) a nucleic acid molecule comprising a nucleic acid sequence of SEQ ID NO: 1-100;
(c) a nucleic acid molecule that selectively hybridizes to the nucleic acid molecule of (a) or (b);
(d) a nucleic acid molecule having at least 95% sequence identity to the nucleic acid molecule of (a) or (b);
(e) a polypeptide comprising an amino acid sequence with at least 95% sequence identity to of SEQ ID NO: 101-240 ; or
(f) a polypeptide comprising an amino acid sequence encoded by a nucleic acid molecule having at least 95% sequence identity to a nucleic acid molecule comprising a nucleic acid sequence of SEQ ID NO: 1-100;
to a patient in need thereof, wherein said administration induces an immune response against the ovarian cancer cell expressing the nucleic acid molecule or polypeptide.

18. A vaccine comprising the polypeptide or the nucleic acid encoding the polypeptide of claim 12.

The application's sequence listing, which the Patent Office published only in electronic form, follows.

SEQUENCE LISTING (240 sequences)

SEQ ID NO: 1 - DNA, 1968 bp, Homo sapien
gccttgggcagcgcacaatctgcgcagcagtactcggctaaccctcttcctctcgacctgtttcttcagagcacggagacgggtatcccttcgacgggaaggacgggctcctggcacacgcctttcctcctggccccggcattcagggagacgcccatttcgacgatgacgagttgtggtccctgggcaagggcgtcggtgagattctgagtcctcctggcccctgattcccttcattctctcccactcatcacccgccgccctaactccggtcccccctcctcctgcagtggttccaactcggtttggaaacgcagatggcgcggcctgccacttccccttcatcttcgagggccgctcctactctgcctgcaccaccgacggtcgctccgacggcttgccctggtgcagtaccacggccaactacgacaccgacgaccggtttggcttctgccccagcgagagactctacacccgggacggcaatgctgatgggaaaccctgccagtttccattcatcttccaaggccaatcctactccgcctgcaccacggacggtcgctccgacggctaccgctggtgcgccaccaccgccaactacgaccgggacaagctcttcggcttctgcccgacccgagctgactcgacggtgatggggggcaactcggcgggggagctgtgcgtcttccccttcactttcctgggtaaggagtactcgacctgtaccagcgagggccgcggagatgggcgcctctggtgcgctaccacctcgaactttgacagcgacaagaagtggggcttctgcccggaccaaggatacagtttgttcctcgtggcggcgcatgagttcggccacgcgctgggcttagatcattcctcagtgccggaggcgctcatgtaccctatgtaccgcttcactgaggggccccccttgcataaggacgacgtgaatggcatccggcacctctatggtcctcgccctgaacctgagccacggcctccaaccaccaccacaccgcagcccacggctcccccgacggtctgccccaccggaccccccactgtccacccctcagagcgccccacagctggccccacaggtcccccctcagctggccccacaggtccccccactgctggcccttctacggccactactgtgcctttgagtccggtggacgatgcctgcaacgtgaacatcttcgacgccatcgcggagattgggaaccagctgtatttgttcaaggatgggaagtactggcgattctctgagggcagggggagccggccgcagggccccttccttatcgccgacaagtggcccgcgctgccccgcaagctggactcggtctttgaggagccgctctccaagaagcttttcttcttctctgggcgccaggtgtgggtgtacacaggcgcgtcggtgctgggcccgaggcgtctggacaagctgggcctgggagccgacgtggcccaggtgaccggggccctccggagtggcagggggaagatgctgctgttcagcgggcggcgcctctggaggttcgacgtgaaggcgcagatggtggatccccggagcgccagcgaggtggaccggatgttccccggggtgcctttggacacgcacgacgtcttccagtaccgagagaaagcctatttctgccaggaccgcttctactggcgcgtgagttcccggagtgagttgaaccaggtggaccaagtgggctacgtgacctatgacatcctgcagtgccctgaggactagggctcccgtcctgctttggcagtgccatgtaaatccccactgggaccaaccctggggaaggagccagtttgccggatacaaactggtattctgttctggaggaaagggaggagtggaggtgggctgggccctctcttctcacctttgttttttgttggagtgtttctaataaacttggattctctaaactttaaaagcagact

SEQ ID NO: 2 - DNA, 2286 bp, Homo sapien
cgatatgatatatgacggggggcgctttgcactgcgtgaagtgctctacaagcccgcaggtgtcatgctactgacgaaggagccagtcggaacggagccaaaggactggcgtcccgtctcctgcgacccgtgggccggccattcccgcgcccattcgcttccctcactcactccgcttctaccgcgtcttcctctcccagccttgccctgactcaccgagggcggcgctgacacagcagatccggtcgcaggcagcgtccagcatggactggtccaggcacctccgacccacctctgccctcaccatgagcctctggcagcccctggtcctggtgctcctggtgctgggctgctgctttgctgcccccagacagcgccagtccacccttgtgctcttccctggagacctgagaaccaatctcaccgacaggcagctggcagaggaatacctgtaccgctatggttacactcgggtggcagagatgcgtggagagtcgaaatctctggggcctgcgctgctgcttctccagaagcaactgtccctgcccgagaccggtgagctggatagcgccacgctgaaggccatgcgaaccccacggtgcggggtcccagacctgggcagattccaaacctttgagggcgacctcaagtggcaccaccacaacatcacctattggatccaaaactactcggaagacttgccgcgggcggtgattgacgacgcctttgcccgcgccttcgcactgtggagcgcggtgacgccgctcaccttcactcgcgtgtacagccgggacgcagacatcgtcatccagtttggtgtcgcggagcacggagacgggtatcccttcgacgggaaggacgggctcctggcacacgcctttcctcctggccccggcattcagggagacgcccatttcgacgatgacgagttgtggtccctgggcaagggcgtcgtggttccaactcggtttggaaacgcagatggcgcggcctgccacttccccttcatcttcgagggccgctcctactctgcctgcaccaccgacggtcgctccgacggcttgccctggtgcagtaccacggccaactacgacaccgacgaccggtttggcttctgccccagcgagagactctacacccgggacggcaatgctgatgggaaaccctgccagtttccattcatcttccaaggccaatcctactccgcctgcaccacggacggtcgctccgacggctaccgctggtgcgccaccaccgccaactacgaccgggacaagctcttcggcttctgcccgacccgagctgactcgacggtgatggggggcaactcggcgggggagctgtgcgtcttccccttcactttcctgggtaaggagtactcgacctgtaccagcgagggccgcggagatgggcgcctctggtgcgctaccacctcgaactttgacagcgacaagaagtggggcttctgcccggaccaaggatacagtttgttcctcgtggcggcgcatgagttcggccacgcgctgggcttagatcattcctcagtgccggaggcgctcatgtaccctatgtaccgcttcactgaggggccccccttgcataaggacgacgtgaatggcatccggcacctctatggtcctcgccctgaacctgagccacggcctccaaccaccaccacaccgcagcccacggctcccccgacggtctgccccaccggaccccccactgtccacccctcagagcgccccacagctggccccacaggtcccccctcagctggccccacaggtccccccactgctggcccttctacggccactactgtgcctttgagtccggtggacgatgcctgcaacgtgaacatcttcgacgccatcgcggagattgggaaccagctgtatttgttcaaggatggatgttccccggggtgcctttggacacgcacgacgtcttccagtaccgagagaaagcctatttctgccaggaccgcttctactggcgcgtgagttcccggagtgagttgaaccaggtggaccaagtgggctacgtgacctatgacatcctgcagtgccctgaggactagggctcccgtcctgctttggcagtgccatgtaaatccccactgggaccaaccctggggaaggagccagtttgccggatacaaactggtattctgttctggaggaaagggaggagtggaggtgggctgggccctctcttctcacctttgttttttgttggagtgtttctaataaacttggattctctaaactttaaaagcagact

SEQ ID NO: 3 - DNA, 2889 bp, Homo sapien
cgatatgatatatgacggggggcgctttgcactgcgtgaagtgctctacaagcccgcaggtgtcatgctactgacgaaggagccagtcggaacggagccaaaggactggcgtcccgtctcctgcgacccgtgggccggccattcccgcgcccattcgcttccctcactcactccgcttctaccgcgtcttcctctcccagccttgccctgactcaccgagggcggcgctgacacagcagatccggtcgcaggcagcgtccagcatggactggtccaggcacctccgacccacctctgccctcaccatgagcctctggcagcccctggtcctggtgctcctggtgctgggctgctgctttgctgcccccagacagcgccagtccacccttgtgctcttccctggagacctgagaaccaatctcaccgacaggcagctggcagaggaatacctgtaccgctatggttacactcgggtggcagagatgcgtggagagtcgaaatctctggggcctgcgctgctgcttctccagaagcaactgtccctgcccgagaccggtgagctggatagcgccacgctgaaggccatgcgaaccccacggtgcggggtcccagacctgggcagattccaaacctttgagggcgacctcaagtggcaccaccacaacatcacctattggatccaaaactactcggaagacttgccgcgggcggtgattgacgacgcctttgcccgcgccttcgcactgtggagcgcggtgacgccgctcaccttcactcgcgtgtacagccgggacgcagacatcgtcatccagtttggtgtcgcggagcacggagacgggtatcccttcgacgggaaggacgggctcctggcacacgcctttcctcctggccccggcattcagggagacgcccatttcgacgatgacgagttgtggtccctgggcaagggcgtcgtggttccaactcggtttggaaacgcagatggcgcggcctgccacttccccttcatcttcgagggccgctcctactctgcctgcaccaccgacggtcgctccgacggcttgccctggtgcagtaccacggccaactacgacaccgacgaccggtttggcttctgccccagcgagagtgagtgagggggctcgccgagggctgggggcgcccaccacccttgatggtcctgggttctaattccagctctgccactagtgctgtgtggcctgcaattcaccctcccgcactctgggcccaattttctcatctgagaaatgatgagagatgggatgaactgcagaccatccatgggtcaaagaacaggacacacttgggggttataatgtgctgtctccgccttctccccctttcccacatcctcctcgccccaggactctacacccgggacggcaatgctgatgggaaaccctgccagtttccattcatcttccaaggccaatcctactccgcctgcaccacggacggtcgctccgacggctaccgctggtgcgccaccaccgccaactacgaccgggacaagctcttcggcttctgcccgacccgagctgactcgacggtgatggggggcaactcggcgggggagctgtgcgtcttccccttcactttcctgggtaaggagtactcgacctgtaccagcgagggccgcggagatgggcgcctctggtgcgctaccacctcgaactttgacagcgacaagaagtggggcttctgcccggaccaaggatacagtttgttcctcgtggcggcgcatgagttcggccacgcgctgggcttagatcattcctcagtgccggaggcgctcatgtaccctatgtaccgcttcactgaggggccccccttgcataaggacgacgtgaatggcatccggcacctctatggtcctcgccctgaacctgagccacggcctccaaccaccaccacaccgcagcccacggctcccccgacggtctgccccaccggaccccccactgtccacccctcagagcgccccacagctggccccacaggtcccccctcagctggccccacaggtccccccactgctggcccttctacggccactactgtgcctttgagtccggtggacgatgcctgcaacgtgaacatcttcgacgccatcgcggagattgggaaccagctgtatttgttcaaggatgggaagtactggcgattctctgagggcagggggagccggccgcagggccccttccttatcgccgacaagtggcccgcgctgccccgcaagctggactcggtctttgaggagccgctctccaagaagcttttcttcttctctgggcgccaggtgtgggtgtacacaggcgcgtcggtgctgggcccgaggcgtctggacaagctgggcctgggagccgacgtggcccaggtgaccggggccctccggagtggcagggggaagatgctgctgttcagcgggcggcgcctctggaggttcgacgtgaaggcgcagatggtggatccccggagcgccagcgaggtggaccggatgttccccggggtgcctttggacacgcacgacgtcttccagtaccgagagaaagcctatttctgccaggaccgcttctactggcgcgtgagttcccggagtgagttgaaccaggtggaccaagtgggctacgtgacctatgacatcctgcagtgccctgaggactagggctcccgtcctgctttggcagtgccatgtaaatccccactgggaccaaccctggggaaggagccagtttgccggatacaaactggtattctgttctggaggaaagggaggagtggaggtgggctgggccctctcttctcacctttgttttttgttggagtgtttctaataaacttggattctctaaactttaaaagcagact

SEQ ID NO: 4 - DNA, 2307 bp, Homo sapien
cgatatgatatatgacggggggcgctttgcactgcgtgaagtgctctacaagcccgcaggtgtcatgctactgacgaaggagccagtcggaacggagccaaaggactggcgtcccgtctcctgcgacccgtgggccggccattcccgcgcccattcgcttccctcactcactccgcttctaccgcgtcttcctctcccagccttgccctgactcaccgagggcggcgctgacacagcagatccggtcgcaggcagcgtccagcatggactggtccaggcacctccgacccacctctgccctcaccatgagcctctggcagcccctggtcctggtgctcctggtgctgggctgctgctttgctgcccccagacagcgccagtccacccttgtgctcttccctggagacctgagaaccaatctcaccgacaggcagctggcagaggaatacctgtaccgctatggttacactcgggtggcagagatgcgtggagagtcgaaatctctggggcctgcgctgctgcttctccagaagcaactgtccctgcccgagaccggtgagctggatagcgccacgctgaaggccatgcgaaccccacggtgcggggtcccagacctgggcagattccaaacctttgagggcgacctcaagtggcaccaccacaacatcacctattggatccaaaactactcggaagacttgccgcgggcggtgattgacgacgcctttgcccgcgccttcgcactgtggagcgcggtgacgccgctcaccttcactcgcgtgtacagccgggacgcagacatcgtcatccagtttggtgtcgcggagcacggagacgggtatcccttcgacgggaaggacgggctcctggcacacgcctttcctcctggccccggcattcagggagacgcccatttcgacgatgacgagttgtggtccctgggcaagggcgtcgtggttccaactcggtttggaaacgcagatggcgcggcctgccacttccccttcatcttcgagggccgctcctactctgcctgcaccaccgacggtcgctccgacggcttgccctggtgcagtaccacggccaactacgacaccgacgaccggtttggcttctgccccagcgagagactctacacccgggacggcaatgctgatgggaaaccctgccagtttccattcatcttccaaggccaatcctactccgcctgcaccacggacggtcgctccgacggctaccgctggtgcgccaccaccgccaactacgaccgggacaagctcttcggcttctgcccgacccgagctgactcgacggtgatggggggcaactcggcgggggagctgtgcgtcttccccttcactttcctgggtaaggagtactcgacctgtaccagcgagggccgcggagatgggcgcctctggtgcgctaccacctcgaactttgacagcgacaagaagtggggcttctgcccggaccaaggatacagtttgttcctcgtggcggcgcatgagttcggccacgcgctgggcttagatcattcctcagtgccggaggcgctcatgtaccctatgtaccgcttcactgaggggccccccttgcataaggacgacgtgaatggcatccggcacctctatggtcctcgccctgaacctgagccacggcctccaaccaccaccacaccgcagcccacggctcccccgacggtctgccccaccggaccccccactgtccacccctcagagcgccccacagctggccccacaggtcccccctcagctggccccacaggtccccccactgctggcccttctacggccactactgtgcctttgagtccggtggacgatgcatgctgctgttcagcgggcggcgcctctggaggttcgacgtgaaggcgcagatggtggatccccggagcgccagcgaggtggaccggatgttccccggggtgcctttggacacgcacgacgtcttccagtaccgagagaaagcctatttctgccaggaccgcttctactggcgcgtgagttcccggagtgagttgaaccaggtggaccaagtgggctacgtgacctatgacatcctgcagtgccctgaggactagggctcccgtcctgctttggcagtgccatgtaaatccccactgggaccaaccctggggaaggagccagtttgccggatacaaactggtattctgttctggaggaaagggaggagtggaggtgggctgggccctctcttctcacctttgttttttgttggagtgtttctaataaacttggattctctaaactttaaaagcagact

SEQ ID NO: 5 - DNA, 2212 bp, Homo sapien
ccaccaccgccaactacgaccgggacaagctcttcggcttctgcccgacccgaggtacctccaccctgtctaccaggttcagccccgccctctcatcatgtattggcccccaaaacgcggctcttccctcccatcagtttgtctttccagcacggagacgggtatcccttcgacgggaaggacgggctcctggcacacgcctttcctcctggccccggcattcagggagacgcccatttcgacgatgacgagttgtggtccctgggcaagggcgtcgtggttccaactcggtttggaaacgcagatggcgcggcctgccacttccccttcatcttcgagggccgctcctactctgcctgcaccaccgacggtcgctccgacggcttgccctggtgcagtaccacggccaactacgacaccgacgaccggtttggcttctgccccagcgagagtgagtgagggggctcgccgagggctgggggcgcccaccacccttgatggtcctgggttctaattccagctctgccactagtgctgtgtggcctgcaattcaccctcccgcactctgggcccaattttctcatctgagaaatgatgagagatgggatgaactgcagaccatccatgggtcaaagaacaggacacacttgggggttataatgtgctgtctccgccttctccccctttcccacatcctcctcgccccaggactctacacccgggacggcaatgctgatgggaaaccctgccagtttccattcatcttccaaggccaatcctactccgcctgcaccacggacggtcgctccgacggctaccgctggtgcgccaccaccgccaactacgaccgggacaagctcttcggcttctgcccgacccgagctgactcgacggtgatggggggcaactcggcgggggagctgtgcgtcttccccttcactttcctgggtaaggagtactcgacctgtaccagcgagggccgcggagatgggcgcctctggtgcgctaccacctcgaactttgacagcgacaagaagtggggcttctgcccggaccaaggatacagtttgttcctcgtggcggcgcatgagttcggccacgcgctgggcttagatcattcctcagtgccggaggcgctcatgtaccctatgtaccgcttcactgaggggccccccttgcataaggacgacgtgaatggcatccggcacctctatggtcctcgccctgaacctgagccacggcctccaaccaccaccacaccgcagcccacggctcccccgacggtctgccccaccggaccccccactgtccacccctcagagcgccccacagctggccccacaggtcccccctcagctggccccacaggtccccccactgctggcccttctacggccactactgtgcctttgagtccggtggacgatgcctgcaacgtgaacatcttcgacgccatcgcggagattgggaaccagctgtatttgttcaaggatgggaagtactggcgattctctgagggcagggggagccggccgcagggccccttccttatcgccgacaagtggcccgcgctgccccgcaagctggactcggtctttgaggagccgctctccaagaagcttttcttcttctctgggcgccaggtgtgggtgtacacaggcgcgtcggtgctgggcccgaggcgtctggacaagctgggcctgggagccgacgtggcccaggtgaccggggccctccggagtggcagggggaagatgctgctgttcagcgggcggcgcctctggaggttcgacgtgaaggcgcagatggtggatccccggagcgccagcgaggtggaccggatgttccccggggtgcctttggacacgcacgacgtcttccagtaccgagagaaagcctatttctgccaggaccgcttctactggcgcgtgagttcccggagtgagttgaaccaggtggaccaagtgggctacgtgacctatgacatcctgcagtgccctgaggactagggctcccgtcctgctttggcagtgccatgtaaatccccactgggaccaaccctggggaaggagccagtttgccggatacaaactggtattctgttctggaggaaagggaggagtggaggtgggctgggccctctcttctcacctttgttttttgttggagtgtttctaataaacttggattctctaaactttaaaagcagact

SEQ ID NO: 6 - DNA, 2724 bp, Homo sapien
cgatatgatatatgacggggggcgctttgcactgcgtgaagtgctctacaagcccgcaggtgtcatgctactgacgaaggagccagtcggaacggagccaaaggactggcgtcccgtctcctgcgacccgtgggccggccattcccgcgcccattcgcttccctcactcactccgcttctaccgcgtcttcctctcccagccttgccctgactcaccgagggcggcgctgacacagcagatccggtcgcaggcagcgtccagcatggactggtccaggcacctccgacccacctctgccctcaccatgagcctctggcagcccctggtcctggtgctcctggtgctgggctgctgctttgctgcccccagacagcgccagtccacccttgtgctcttccctggagacctgagaaccaatctcaccgacaggcagctggcagaggaatacctgtaccgctatggttacactcgggtggcagagatgcgtggagagtcgaaatctctggggcctgcgctgctgcttctccagaagcaactgtccctgcccgagaccggtgagctggatagcgccacgctgaaggccatgcgaaccccacggtgcggggtcccagacctgggcagattccaaacctttgagggcgacctcaagtggcaccaccacaacatcacctattggatccaaaactactcggaagacttgccgcgggcggtgattgacgacgcctttgcccgcgccttcgcactgtggagcgcggtgacgccgctcaccttcactcgcgtgtacagccgggacgcagacatcgtcatccagtttggtgtcgcggagcacggagacgggtatcccttcgacgggaaggacgggctcctggcacacgcctttcctcctggccccggcattcagggagacgcccatttcgacgatgacgagttgtggtccctgggcaagggcgtcggtgagattctgagtcctcctggcccctgattcccttcattctctcccactcatcacccgccgccctaactccggtcccccctcctcctgcagtggttccaactcggtttggaaacgcagatggcgcggcctgccacttccccttcatcttcgagggccgctcctactctgcctgcaccaccgacggtcgctccgacggcttgccctggtgcagtaccacggccaactacgacaccgacgaccggtttggcttctgccccagcgagagactctacacccgggacggcaatgctgatgggaaaccctgccagtttccattcatcttccaaggccaatcctactccgcctgcaccacggacggtcgctccgacggctaccgctggtgcgccaccaccgccaactacgaccgggacaagctcttcggcttctgcccgacccgagctgactcgacggtgatggggggcaactcggcgggggagctgtgcgtcttccccttcactttcctgggtaaggagtactcgacctgtaccagcgagggccgcggagatgggcgcctctggtgcgctaccacctcgaactttgacagcgacaagaagtggggcttctgcccggaccaaggatacagtttgttcctcgtggcggcgcatgagttcggccacgcgctgggcttagatcattcctcagtgccggaggcgctcatgtaccctatgtaccgcttcactgaggggccccccttgcataaggacgacgtgaatggcatccggcacctctatggtcctcgccctgaacctgagccacggcctccaaccaccaccacaccgcagcccacggctcccccgacggtctgccccaccggaccccccactgtccacccctcagagcgccccacagctggccccacaggtcccccctcagctggccccacaggtccccccactgctggcccttctacggccactactgtgcctttgagtccggtggacgatgcctgcaacgtgaacatcttcgacgccatcgcggagattgggaaccagctgtatttgttcaaggatgggaagtactggcgattctctgagggcagggggagccggccgcagggccccttccttatcgccgacaagtggcccgcgctgccccgcaagctggactcggtctttgaggagccgctctccaagaagcttttcttcttctctgggcgccaggtgtgggtgtacacaggcgcgtcggtgctgggcccgaggcgtctggacaagctgggcctgggagccgacgtggcccaggtgaccggggccctccggagtggcagggggaagatgctgctgttcagcgggcggcgcctctggaggttcgacgtgaaggcgcagatggtggatccccggagcgccagcgaggtggaccggatgttccccggggtgcctttggacacgcacgacgtcttccagtaccgagagaaagcctatttctgccaggaccgcttctactggcgcgtgagttcccggagtgagttgaaccaggtggaccaagtgggctacgtgacctatgacatcctgcagtgccctgaggactagggctcccgtcctgctttggcagtgccatgtaaatccccactgggaccaaccctggggaaggagccagtttgccggatacaaactggtattctgttctggaggaaagggaggagtggaggtgggctgggccctctcttctcacctttgttttttgttggagtgtttctaataaacttggattctctaaactttaaaagcagact

SEQ ID NO: 7 - DNA, 2632 bp, Homo sapien
cgatatgatatatgacggggggcgctttgcactgcgtgaagtgctctacaagcccgcaggtgtcatgctactgacgaaggagccagtcggaacggagccaaaggactggcgtcccgtctcctgcgacccgtgggccggccattcccgcgcccattcgcttccctcactcactccgcttctaccgcgtcttcctctcccagccttgccctgactcaccgagggcggcgctgacacagcagatccggtcgcaggcagcgtccagcatggactggtccaggcacctccgacccacctctgccctcaccatgagcctctggcagcccctggtcctggtgctcctggtgctgggctgctgctttgctgcccccagacagcgccagtccacccttgtgctcttccctggagacctgagaaccaatctcaccgacaggcagctggcagaggaatacctgtaccgctatggttacactcgggtggcagagatgcgtggagagtcgaaatctctggggcctgcgctgctgcttctccagaagcaactgtccctgcccgagaccggtgagctggatagcgccacgctgaaggccatgcgaaccccacggtgcggggtcccagacctgggcagattccaaacctttgagggcgacctcaagtggcaccaccacaacatcacctattggatccaaaactactcggaagacttgccgcgggcggtgattgacgacgcctttgcccgcgccttcgcactgtggagcgcggtgacgccgctcaccttcactcgcgtgtacagccgggacgcagacatcgtcatccagtttggtgtcgcggagcacggagacgggtatcccttcgacgggaaggacgggctcctggcacacgcctttcctcctggccccggcattcagggagacgcccatttcgacgatgacgagttgtggtccctgggcaagggcgtcgtggttccaactcggtttggaaacgcagatggcgcggcctgccacttccccttcatcttcgagggccgctcctactctgcctgcaccaccgacggtcgctccgacggcttgccctggtgcagtaccacggccaactacgacaccgacgaccggtttggcttctgccccagcgagagactctacacccgggacggcaatgctgatgggaaaccctgccagtttccattcatcttccaaggccaatcctactccgcctgcaccacggacggtcgctccgacggctaccgctggtgcgccaccaccgccaactacgaccgggacaagctcttcggcttctgcccgacccgagctgactcgacggtgatggggggcaactcggcgggggagctgtgcgtcttccccttcactttcctgggtaaggagtactcgacctgtaccagcgagggccgcggagatgggcgcctctggtgcgctaccacctcgaactttgacagcgacaagaagtggggcttctgcccggaccaaggatacagtttgttcctcgtggcggcgcatgagttcggccacgcgctgggcttagatcattcctcagtgccggaggcgctcatgtaccctatgtaccgcttcactgaggggccccccttgcataaggacgacgtgaatggcatccggcacctctatggtcctcgccctgaacctgagccacggcctccaaccaccaccacaccgcagcccacggctcccccgacggtctgccccaccggaccccccactgtccacccctcagagcgccccacagctggccccacaggtcccccctcagctggccccacaggtccccccactgctggcccttctacggccactactgtgcctttgagtccggtggacgatgcctgcaacgtgaacatcttcgacgccatcgcggagattgggaaccagctgtatttgttcaaggatgggaagtactggcgattctctgagggcagggggagccggccgcagggccccttccttatcgccgacaagtggcccgcgctgccccgcaagctggactcggtctttgaggagccgctctccaagaagcttttcttcttctctgggcgccaggtgtgggtgtacacaggcgcgtcggtgctgggcccgaggcgtctggacaagctgggcctgggagccgacgtggcccaggtgaccggggccctccggagtggcagggggaagatgctgctgttcagcgggcggcgcctctggaggttcgacgtgaaggcgcagatggtggatccccggagcgccagcgaggtggaccggatgttccccggggtgcctttggacacgcacgacgtcttccagtaccgagagaaagcctatttctgccaggaccgcttctactggcgcgtgagttcccggagtgagttgaaccaggtggaccaagtgggctacgtgacctatgacatcctgcagtgccctgaggactagggctcccgtcctgctttggcagtgccatgtaaatccccactgggaccaaccctggggaaggagccagtttgccggatacaaactggtattctgttctggaggaaagggaggagtggaggtgggctgggccctctcttctcacctttgttttttgttggagtgtttctaataaacttggattctctaaactttaaaagcagact

SEQ ID NO: 8 - DNA, 494 bp, Homo sapien
atcccccgcgcggccccctcagctgaagcagccggggaagtccatctccaactgggaggtgatggagaggctgaagggcatggtgcagaaccaccagttctccacgctgcgtatttccaagagcaccatggacttcatccgcttcgagggggaggtggagaacaagagcctgagaaagcctatttctgccaggaccgcttctactggcgcgtgagttcccggagtgagttgaaccaggtggaccaagtgggctacgtgacctatgacatcctgcagtgccctgaggactagggctcccgtcctgctttggcagtgccatgtaaatccccactgggaccaaccctggggaaggagccagtttgccggatacaaactggtattctgttctggaggaaagggaggagtggaggtgggctgggccctctcttctcacctttgttttttgttggagtgtttctaataaacttggattctctaaactttaaaagcagact

SEQ ID NO: 9 - DNA, 2372 bp, Homo sapien
cgatatgatatatgacggggggcgctttgcactgcgtgaagtgctctacaagcccgcaggtgtcatgctactgacgaaggagccagtcggaacggagccaaaggactggcgtcccgtctcctgcgacccgtgggccggccattcccgcgcccattcgcttccctcactcactccgcttctaccgcgtcttcctctcccagccttgccctgactcaccgagggcggcgctgacacagcagatccggtcgcaggcagcgtccagcatggactggtccaggcacctccgacccacctctgccctcaccatgagcctctggcagcccctggtcctggtgctcctggtgctgggctgctgctttgctgcccccagacagcgccagtccacccttgtgctcttccctggagacctgagaaccaatctcaccgacaggcagctggcagaggaatacctgtaccgctatggttacactcgggtggcagagatgcgtggagagtcgaaatctctggggcctgcgctgctgcttctccagaagcaactgtccctgcccgagaccggtgagctggatagcgccacgctgaaggccatgcgaaccccacggtgcggggtcccagacctgggcagattccaaacctttgagggcgacctcaagtggcaccaccacaacatcacctattggatccaaaactactcggaagacttgccgcgggcggtgattgacgacgcctttgcccgcgccttcgcactgtggagcgcggtgacgccgctcaccttcactcgcgtgtacagccgggacgcagacatcgtcatccagtttggtgtcgcggagcacggagacgggtatcccttcgacgggaaggacgggctcctggcacacgcctttcctcctggccccggcattcagggagacgcccatttcgacgatgacgagttgtggtccctgggcaagggcgtcgtggttccaactcggtttggaaacgcagatggcgcggcctgccacttccccttcatcttcgagggccgctcctactctgcctgcaccaccgacggtcgctccgacggcttgccctggtgcagtaccacggccaactacgacaccgacgaccggtttggcttctgccccagcgagagactctacacccgggacggcaatgctgatgggaaaccctgccagtttccattcatcttccaaggccaatcctactccgcctgcaccacggacggtcgctccgacggctaccgctggtgcgccaccaccgccaactacgaccgggacaagctcttcggcttctgcccgacccgagctgactcgacggtgatggggggcaactcggcgggggagctgtgcgtcttccccttcactttcctgggtaaggagtcctcgccctgaacctgagccacggcctccaaccaccaccacaccgcagcccacggctcccccgacggtctgccccaccggaccccccactgtccacccctcagagcgccccacagctggccccacaggtcccccctcagctggccccacaggtccccccactgctggcccttctacggccactactgtgcctttgagtccggtggacgatgcctgcaacgtgaacatcttcgacgccatcgcggagattgggaaccagctgtatttgttcaaggatgggaagtactggcgattctctgagggcagggggagccggccgcagggccccttccttatcgccgacaagtggcccgcgctgccccgcaagctggactcggtctttgaggagccgctctccaagaagcttttcttcttctctgggcgccaggtgtgggtgtacacaggcgcgtcggtgctgggcccgaggcgtctggacaagctgggcctgggagccgacgtggcccaggtgaccggggccctccggagtggcagggggaagatgctgctgttcagcgggcggcgcctctggaggttcgacgtgaaggcgcagatggtggatccccggagcgccagcgaggtggaccggatgttccccggggtgcctttggacacgcacgacgtcttccagtaccgagagaaagcctatttctgccaggaccgcttctactggcgcgtgagttcccggagtgagttgaaccaggtggaccaagtgggctacgtgacctatgacatcctgcagtgccctgaggactagggctcccgtcctgctttggcagtgccatgtaaatccccactgggaccaaccctggggaaggagccagtttgccggatacaaactggtattctgttctggaggaaagggaggagtggaggtgggctgggccctctcttctcacctttgttttttgttggagtgtttctaataaacttggattctctaaactttaaaagcagact

SEQ ID NO: 10 - DNA, 2959 bp, Homo sapien
cgatatgatatatgacggggggcgctttgcactgcgtgaagtgctctacaagcccgcaggtgtcatgctactgacgaaggagccagtcggaacggagccaaaggactggcgtcccgtctcctgcgacccgtgggccggccattcccgcgcccattcgcttccctcactcactccgcttctaccgcgtcttcctctcccagccttgccctgactcaccgagggcggcgctgacacagcagatccggtcgcaggcagcgtccagcatggactggtccaggcacctccgacccacctctgccctcaccatgagcctctggcagcccctggtcctggtgctcctggtgctgggctgctgctttgctgcccccagacagcgccagtccacccttgtgctcttccctggagacctgagaaccaatctcaccgacaggcagctggcagaggaatacctgtaccgctatggttacactcgggtggcagagatgcgtggagagtcgaaatctctggggcctgcgctgctgcttctccagaagcaactgtccctgcccgagaccggtgagctggatagcgccacgctgaaggccatgcgaaccccacggtgcggggtcccagacctgggcagattccaaacctttgagggcgacctcaagtggcaccaccacaacatcacctattggatccaaaactactcggaagacttgccgcgggcggtgattgacgacgcctttgcccgcgccttcgcactgtggagcgcggtgacgccgctcaccttcactcgcgtgtacagccgggacgcagacatcgtcatccagtttggtgtcgcggagcacggagacgggtatcccttcgacgggaaggacgggctcctggcacacgcctttcctcctggccccggcattcagggagacgcccatttcgacgatgacgagttgtggtccctgggcaagggcgtcgtggttccaactcggtttggaaacgcagatggcgcggcctgccacttccccttcatcttcgagggccgctcctactctgcctgcaccaccgacggtcgctccgacggcttgccctggtgcagtaccacggccaactacgacaccgacgaccggtttggcttctgccccagcgagagactctacacccgggacggcaatgctgatgggaaaccctgccagtttccattcatcttccaaggccaatcctactccgcctgcaccacggacggtcgctccgacggctaccgctggtgcgccaccaccgccaactacgaccgggacaagctcttcggcttctgcccgacccgagctgactcgacggtgatggggggcaactcggcgggggagctgtgcgtcttccccttcactttcctgggtaaggagtactcgacctgtaccagcgagggccgcggagatgggcgcctctggtgcgctaccacctcgaactttgacagcgacaagaagtggggcttctgcccggaccaaggatacagtttgttcctcgtggcggcgcatgagttcggccacgcgctgggcttagatcattcctcagtgccggaggcgctcatgtaccctatgtaccgcttcactgaggggccccccttgcataaggacgacgtgaatggcatccggcacctctatggtcctcgccctgaacctgagccacggcctccaaccaccaccacaccgcagcccacggctcccccgacggtctgccccaccggaccccccactgtccacccctcagagcgccccacagctggccccacaggtcccccctcagctggccccacaggtccccccactgctggcccttctacggccactactgtgcctttgagtccggtggacgatgcctgcaacgtgaacatcttcgacgccatcgcggagattgggaaccagctgtatttgttcaaggatgggaagtactggcgattctctgagggcagggggagccggccgcagggccccttccttatcgccgacaagtggcccgcgctgccccgcaagctggactcggtctttgaggagccgctctccaagaagcttttcttcttctctggttagttacctactttccctcccccgcccggtcaatccccatcagtcaaggaggctcaagagaccatcgataacccacgaaacgtcttgtgcgttttagaaaaatacgccccctggcggacgcagtttagcaaacgtaggggcggctgagtttctgccccctcctctccacgccctcgcgtcgctctacccagcgcctctgcccctgggttgcagggactgcgggcacgcgggctaggaaaggcctcgccggaatctccctcctcgcgttctaggagtacgtgctccctctgcgcccccaaaccgacgtgaccctcctcccctgcagggcgccaggtgtgggtgtacacaggcgcgtcggtgctgggcccgaggcgtctggacaagctgggcctgggagccgacgtggcccaggtgaccggggccctccggagtggcagggggaagatgctgctgttcagcgggcggcgcctctggaggttcgacgtgaaggcgcagatggtggatccccggagcgccagcgaggtggaccggatgttccccggggtgcctttggacacgcacgacgtcttccagtaccgagagaaagcctatttctgccaggaccgcttctactggcgcgtgagttcccggagtgagttgaaccaggtggaccaagtgggctacgtgacctatgacatcctgcagtgccctgaggactagggctcccgtcctgctttggcagtgccatgtaaatccccactgggaccaaccctggggaaggagccagtttgccggatacaaactggtattctgttctggaggaaagggaggagtggaggtgggctgggccctctcttctcacctttgttttttgttggagtgtttctaataaacttggattctctaaactttaaaagcagact

SEQ ID NO: 11 - DNA, 2065 bp, Homo sapien
cgatatgatatatgacggggggcgctttgcactgcgtgaagtgctctacaagcccgcaggtgtcatgctactgacgaaggagccagtcggaacggagccaaaggactggcgtcccgtctcctgcgacccgtgggccggccattcccgcgcccattcgcttccctcactcactccgcttctaccgcgtcttcctctcccagccttgccctgactcaccgagggcggcgctgacacagcagatccggtcgcaggcagcgtccagcatggactggtccaggcacctccgacccacctctgccctcaccatgagcctctggcagcccctggtcctggtgctcctggtgctgggctgctgctttgctgcccccagacagcgccagtccacccttgtgctcttccctggagacctgagaaccaatctcaccgacaggcagctggcagaggaatacctgtaccgctatggttacactcgggtggcagagatgcgtggagagtcgaaatctctggggcctgcgctgctgcttctccagaagcaactgtccctgcccgagaccggtgagctggatagcgccacgctgaaggccatgcgaaccccacggtgcggggtcccagacctgggcagattccaaacctttgagggcgacctcaagtggcaccaccacaacatcacctattggatccaaaactactcggaagacttgccgcgggcggtgattgacgacgcctttgcccgcgccttcgcactgtggagcgcggtgacgccgctcaccttcactcgcgtgtacagccgggacgcagacatcgtcatccagtttggtgtcgcggagcacggagacgggtatcccttcgacgggaaggacgggctcctggcacacgcctttcctcctggccccggcattcagggagacgcccatttcgacgatgacgagttgtggtccctgggcaagggcgtcgtggttccaactcggtttggaaacgcagatggcgcggcctgccacttccccttcatcttcgagggccgctcctactctgcctgcaccaccgacggtcgctccgacggcttgccctggtgcagtaccacggccaactacgacaccgacgaccggtttggcttctgccccagcgagagactctacacccgggacggcaatgctgatgggaaaccctgccagtttccattcatcttccaaggccaatcctactccgcctgcaccacggacggtcgctccgacggctaccgctggtgcgccaccaccgccaactacgaccgggacaagctcttcggcttctgcccgacccgagctgactcgacggtgatggggggcaactcggcgggggagctgtgcgtcttccccttcactttcctgggtaaggagtactcgacctgtaccagcgagggccgcggagatgggcgcctctggtgcgctaccacctcgaactttgacagcgacaagaagtggggcttctgcccggaccaaggatacagtttgttcctcgtggcggcgcatgagttcggccacgcgctgggcttagatcattcctcagtgccggaggcgctcatgtaccctatgtaccgcttcactgaggggccccccttgcataaggacgacgtgaatggcatccggcacctctatggtcctcgccctgaacctgagccacggcctccaaccaccaccacaccgcagcccacggctatgttccccggggtgcctttggacacgcacgacgtcttccagtaccgagagaaagcctatttctgccaggaccgcttctactggcgcgtgagttcccggagtgagttgaaccaggtggaccaagtgggctacgtgacctatgacatcctgcagtgccctgaggactagggctcccgtcctgctttggcagtgccatgtaaatccccactgggaccaaccctggggaaggagccagtttgccggatacaaactggtattctgttctggaggaaagggaggagtggaggtgggctgggccctctcttctcacctttgttttttgttggagtgtttctaataaacttggattctctaaactttaaaagcagact

SEQ ID NO: 12 - DNA, 3537 bp, Homo sapien
gaattcgaggatccgggtaccatgggcggcggcaggcctagcagcacgggaaccgtcccccgcgcgcatgcgcgcgcccctgaagcgcctgggggacgggtatgggcgggaggtaggggcgcggctccgcgtgccagttgggtgcccgcgcgtcacgtggtgaggaaggaggcggaggtctgagtttcgaaggagggggggagagaagagggaacgagcaagggaaggaaagcggggaaaggaggaaggaaacgaacgagggggagggaggtccctgttttggaggagctaggagcgttgccggcccctgaagtggagcgagagggaggtgcttcgccgtttctcctgccaggggaggtcccggcttcccgtggaggctccggaccaagccccttcagcttctccctccggatcgatgtgctgctgttaacccgtgaggaggcggcggcggcggcagcggcagcggaagatggtgttgctgagagtgttaattctgctcctctcctgggcggcggggatgggagaccgagattttgatgatggcgtacttggtctggcttgggttggagcaccttcaggaagctctggaggaatatgtgaaaaaagtaaactctattcagatgtgcctacaatgggaaaacttcactccaaagagaaacctattaagtcatcatctccaaactaaaccctcacaagtaacagttgaagaaaaaatggcaagagatcatatcctcagaccaggtggaattacttaaattttaaagcctgaaaattccaatttgggggtgggaggtggaaaaggaacccaattttcttatgaacagatatttttaacttaatggcacaaagtcttagaatattattatgtgccccgtgttccctgttcttcgttgctgcattttcttcacttgcaggcaaacttggctctcaataaacttttaccacaaattgaaataaatatatttttttcaactgccaatcaaggctaggaggctcgaccacctcaacattggagacatcacttgccaatgtacataccttgttatatgcagacatgtatttcttacgtacactgtacttctgtgtgcaattgtaaacagaaattgcaatatggatgtttctttgtattataaaatttttccgctcttaattaaaaattactgtttaattgacatactcaggataacagagaatggtggtattcagtggtccaggattctgtaatgctttacacaggcagttttgaaatgaaaatcaatttacctttctgttacgatggagttggttttgatactcattttttctttatcacatggctgctacgggcacaagtgactatactgaagaacacagttaagtgttgtgcaaactggacatagcagcacatactacttcagagttcatgatgtagatgtctggtttctgcttacgtcttttaaactttctaattcaattccatttttcaattaataggtgaaattttattcatgctttgatagaaattatgtcaatgaaatgattctttttatttgtagcctacttatttgtgtttttcatatatctgaaatatgctaattatgttttctgtctgatatggaaaagaaaagctgtgtctttatcaaaatatttaaacggttttttcagcatatcatcactgatcattggtaaccactaaagatgagtaatttgcttaagtagtagttaaaattgtagataggccttctgacattttttttcctaaaatttttaacagcattgaaggtgaaacagcacaatgtcccattccaaatttatttttgaaacagatgtaaataattggcattttaaagagaaagcaaaaacatttaatgtattaacaggcttattgctatgcaggaaatagaaggggcattacaaaaattgaagcttgtgacatatttattgcttctgttttccaactacatcacttcaactagaagtaaagctatgattttcctgacttcacataggaggcaaatttagagaaagttgtaaagatttctatgttttgggttttttttttcctttttttttttaagagtataaggtttacacaatcattctcataatgtgacgcaagccagcaaggccaaaaatgctagagaaaataacgggatctcttccttgtaaacttgtacagtatgtggtgactttttcaaaatacagctttttgtacatgatttagagacaaattttgtacatgaaaccccagatagactataaataattctaaacaaacaagtaggtagatatgtatgtaattgcttttaaatcatttaaatgcctttgtttttggactgtgcaaaggttggaagtgggtttgcatttctaaaatggtgacttttattctgcaagagttcttagtaacttcttgagtgtggtagactttggaacatgtaaattttttgcttgtaatgttatcctgtggtaggattttggcaggtacacacactgccctattttattttgagtctaagttaaatgttttctgaaaagagatacatgcactgaactctttccactgcgaatcaagatgtggtaatataaaaggatcaagacaaatgagatctaatactactgtcagttttaatgtccactgtgttttatacagtatctttttttgttcactttggaaatttttactaaaaattgcaaaaaataaagtattgtgcaaagatgtaaggttttttgaaacttgaaatgcattaataaatagacgattaaatcaacttgaaggttctatactctttgaactctgagaactatcacaagaagcttcccacaaggcagtgttttcttacagttgtctcttcctacaaaagtatagattatctttattcttaatactttggaatccatgtagaaaatttccagttagatactctgcgtacacacaataaacctttttaaaacacccaactaatctcaactgcattacattgtttctaatcaatattcagtgcttgtcttggtggaagaggtgagtcattttgaaaacttatggtcttgtttttatgtgtttttcaaagttttgaatgctaagtacctcatttattttaaaaagcctagtttaatgataagtttgtttaaaattttgagccatcatttttctcttcatagcaaataaggagagaattgacatttcagtgttacctagaaaaggaattgtaagcccagaataattccctgcatgaggtaatctgcttcaaattctttttttagtcaaggttagctataagtaatacttgttaaatgagtaaatatgtaatactttgtgaattactttgttaatttaggagcatcaaatgtatattatgtttagttatttatgaaactctcaatattgattgatttgggtaattataaattagttatttttacttgtaattgaatgcttaaattctgtttacagtccgtcctctctccctccatccctccctccccagttttataaattcaggtaccaattcacaaacaaaatcagaaataaaataaatttattgactgcttctggattta

SEQ ID NO: 13 - DNA, 423 bp, Homo sapien
gcggccgcctactactactaaattcgcggccgcgtcgatctggtggccggcacgggcattgggaaacagcctcctcctttcccaaccttgcttcttaggggcccccgtgtcccgtctgctctcagcctcctcctcctgcaggataaagtcatccccaaggctccagctactctaaattatgtctccttataagttattgctgctccaggagattgtccttcatcgtccaggggcctggctcccacgtggttgcagatacctcagacctggtgctctaggctgtgctgagcccactctcccgagggcgcatccaagcgggggccacttgagaagtgaataaatggggcggtttcggaagcgtcagtgtttccatgttatggatctctctgcgtttgaataaagactatctctgttgctcaaaaa

SEQ ID NO: 14 - DNA, 5019 bp, Homo sapien
gggagggataggacggggagacaaagaaaggggtgcggcagcactgccaggggaagagggtgatccgacccggggaaggtcgctgggcagggcgagttgggaaagcggcagcccccgccgcccccgcagccccttctcctcctttctcccacgtcctatctgcctctcgctggaggccaggccgtgcagcatcgaagacaggaggaactggagcctcattggccggcccggggcgccggcctcgggcttaaataggagctccgggctctggctgggacccgaccgctgccggccgcgctcccgctgctcctgccgggtgatggaaaaccccagcccggccgccgccctgggcaaggccctctgcgctctcctcctggccactctcggcgccgccggccagcctcttgggggagagtccatctgttccgccagagccccggccaaatacagcatcaccttcacgggcaagtggagccagacggccttccccaagcagtaccccctgttccgcccccctgcgcagtggtcttcgctgctgggggccgcgcatagctccgactacagcatgtggaggaagaaccagtacgtcagtaacgggctgcgcgactttgcggagcgcggcgaggcctgggcgctgatgaaggagatcgaggcggcgggggaggcgctgcagagcgtgcacgaggtgttttcggcgcccgccgtccccagcggcaccgggcagacgtcggcggagctggaggtgcagcgcaggcactcgctggtctcgtttgtggtgcgcatcgtgcccagccccgactggttcgtgggcgtggacagcctggacctgtgcgacggggaccgttggcgggaacaggcggcgctggacctgtacccctacgacgccgggacggacagcggcttcaccttctcctcccccaacttcgccaccatcccgcaggacacggtgaccgaggtgagtgggcaccccgcgtgcgcaagggccgctatggcccccgcggtggggacggggctggggcctggctgcaccctcgcctcccagcccaggacagccgcttgcggcttttgtgtggaagaggctctgcttctagcgccagcagtgagcaagggggtgcagccctcccatactctcccaacccggggtcacagcaccgcagggaggacagcgggacgcgcgtcccgaggaggcygccccttcctggcctcggtttccagcccgtgttccgtgggatggctgagaggagtacatgggaccctgtccccaacagtggtgcagagggyacgctggacgctgggcagtggccccagtgaggccatacgcataccagaaggtgggcttctcggaccccaggccaacctcttcttcctccccagataacgtcctcctctcccagccacccggccaactccttctactacccgcggctgaaggccctgcctcccatcgccagggtgacactgctgcggctgcgacagagccccagggccttcatccctcccgccccagtcctgcccagcagggacaatgagattgtagacagcgcctcaggtaacggacatacaggtcacatgggacacacagcagccccgaaccctgccacagggcgaccaccaaacccgaacctaaggctctgagaaattccaagtagggattcgtagtgcgtactgcaagatggtgcctagaagatttaggattctgttgattcacacactgaagatgtgactcttgcacattatttgcagttgaaagcatcttacagggccacagcccagaggaaagaatgaaaggaggctccagacagtacctgagagactctgtcctgtcagacacgcacccacaggtgacctgtgtgtcacagctgacaaggaagcttgctaggatggccctgtgtggccaccgggtgacagctatgctgcagggcacctgtgggggtctcgggacccagccaccacacagctcggggctctgctcacaggcgccttggcctggggcggggcaggtgctgatgagcattctcctagctcttccaggcacctgctggacagggcaggctgggaacgctggggccgagtggcagttccctccctactcagctgggtggcagccactggcctcacggagcgcctgtggtctggagcgcattgctgggtcgtgggtcagggcctgttggctctgggtctctgggtctcacctgatatgggtgtgggacagtcagtgtaggccccagacaacagcggacttcagactttcccgaggaggaactggagcccaccaacctggccatgggccccgtcgtcctccaccctccatgttgctggctggagttgaggcaggtacggggccgccccacacctgccccccaagccatgtggtagggacagatgtcgtcttgaggagcagcagtaattacaagcttactgtcagccgtccctggaagcaagggccaggtcaggtcagacaggaggccgcctggctggcgggaaccactccccagacagagactgtgcccagtcctgggtccctcctcatttgggatgaactgggcctccctgtgccagcctcggtgctgcccctgcccagtgcaggcttgggctcctcactcatttgtccacgcggatgccccattccaagcagatgtccccgagccacttacccaacaggcagacgtgccagcactgttcgtggtgtgcaactggtctggcgggaagagcccctcgtgggcagagggtccagagaggtgcggtttgccccacatttgggggcactgggccacagtgggcaggggagcacgtggccagtgccctgggctaggagagggataaagtcagctgtggccaagcagaagcagtattgcaggggaagggtggggagagactgtgctatgagctctgagcaggaggcaggacatggagagaagggtgggagacggacagagccagctgtgccagccgagggaccagagtgggcagtggggacggagcacagaccaccgcccacaagggtctctcctgtgacttctggcttcccgagggcagaggctgggatgggcatgtggcggctggcacccaggaggctccgccaggtccacgccaagccagcctggctcagctctggcttcctgctcacacgctggatgcctgtccccaggcctcctgacagggctctgcagcattggagaggcttgtggtggggccctcgctgtagaacaggcactgccagtgctcactgactcctcattgcagccagggcaggggcgctcccaccacctcggtttcagtcaggaagctggggggtgctgggatctgccagcagctctgtgtgctccccaggtgggctgcccggggccctggctctctggcttctacaccagtgcccctgcgaagcctcagcgcccaaggtctttgcaagccctgttcctgcatctctggagagggctgctccaggtgtgggcctggccagggcttccagaccagtccaggcactgcacctgcacattgacccccttctccactctctctcatccttcagtagccacaaagctggcagcagggtactcgcagatttgtgaggagagccgagcccttgctgactgtcctcccgtgcacggcagagtgaggcggggctcctggcctccttaggggctgcccgctctgggccacacagccagagaaacactgtccatctggctggcttggcctgtggggtgcaaaagaggtgttttcactttgctttggaaacatggaaattaccaagtgacttaaccataacaccaaatgatgatttttaaatttatgaaaattatggaaccagatgggacacagggaaacgagaacgatactgaaaaggtctgagtcctgtggggggtccaggtcccgcaagacagctaatcaggtgcccctgtctgttattcgggtaaatgtagcagctgggtccaggctcgggcagagcagctttctacagcaggggtgtccgccctctcccggggttcccacggggttcccaggggcctcttactctgccacgatgtgggagttccaccaccacagggacttgagcggcagctccggctcttacgtagaaacgcgcaactccagtccctaggttgtgtccgaggttgctatggtgccatcccatcttgccgctcactctgcgactgtgcggagaaacgcaagtgcccccgaagggtgggcgtggcctctgatgaatgcacacgttggtgggaggtggcttccgtttgtacgaagcgcctcttcacgcgagcgttcacctcggtctcccctttgcttggtccagttccagaaacgccgctggactgcgaggtctccctgtggtcgtcctggggactgtgcggaggccactgtgggaggctcgggaccaagagcaggactcgctacgtccgggtccagcccgccaacaacgggagcccctgccccgagctcgaagaagaggctgagtgcgtccctgataactgcgtctaagaccagagccccgcagcccctggggccccccggagccatggggtgtcgggggctcctgtgcaggctcatgctgcaggcggccgagggcacagggggtttcgcgctgctcctgaccgcggtgaggccgcgccgaccatctctgcactgaagggccctctggtggccggcacgggcattgggaaacagcctcctcctttcccaaccttgcttcttaggggcccccgtgtcccgtctgctctcagcctcctcctcctgcaggataaagtcatccccaaggctccagctactctaaattatgtctccttataagttattgctgctccaggagattgtccttcatcgtccaggggcctggctcccacgtggttgcagatacctcagacctggtgctctaggctgtgctgagcccactctcccgagggcgcatccaagcgggggccacttgagaagtgaataaatggggcggtttcggaagcgtcagtgtttccatgttatggatctctctgcgtttgaataaagactatctctgttgctcaaaaa

SEQ ID NO: 15 - DNA, 5384 bp, Homo sapien
gggagggataggacggggagacaaagaaaggggtgcggcagcactgccaggggaagagggtgatccgacccggggaaggtcgctgggcagggcgagttgggaaagcggcagcccccgccgcccccgcagccccttctcctcctttctcccacgtcctatctgcctctcgctggaggccaggccgtgcagcatcgaagacaggaggaactggagcctcattggccggcccggggcgccggcctcgggcttaaataggagctccgggctctggctgggacccgaccgctgccggccgcgctcccgctgctcctgccgggtgatggaaaaccccagcccggccgccgccctgggcaaggccctctgcgctctcctcctggccactctcggcgccgccggccagcctcttgggggagagtccatctgttccgccagagccccggccaaatacagcatcaccttcacgggcaagtggagccagacggccttccccaagcagtaccccctgttccgcccccctgcgcagtggtcttcgctgctgggtaagtacagccccctcctcgcctcctgctccaccaggagggctgcggcgccggagccccccgcacagctgcacggcggcgcttcccagtctggggcgtgctgacgtcgggagactctaacaccagaatgtttgccgagcgcctgcggtgtgcggttccggggatgcggtgggggcagggggcgctcacggggagggcgcaggtgggtcgcggcaggggcagccacagggtgtcacggtccgacgtgactgggggccatggttccctgcgggcggcggggagggatttcctggggcgccccctggaatccaagcccgaccgcagtgtctgaccatggtccgcggcgcggccgggtggtcctgcaggggccgcgcatagctccgactacagcatgtggaggaagaaccagtacgtcagtaacgggctgcgcgactttgcggagcgcggcgaggcctgggcgctgatgaaggagatcgaggcggcgggggaggcgctgcagagcgtgcacgaggtgttttcggcgcccgccgtccccagcggcaccgggcagacgtcggcggagctggaggtgcagcgcaggcactcgctggtctcgtttgtggtgcgcatcgtgcccagccccgactggttcgtgggcgtggacagcctggacctgtgcgacggggaccgttggcgggaacaggcggcgctggacctgtacccctacgacgccgggacggacagcggcttcaccttctcctcccccaacttcgccaccatcccgcaggacacggtgaccgaggtgagtgggcaccccgcgtgcgcaagggccgctatggcccccgcggtggggacggggctggggcctggctgcaccctcgcctcccagcccaggacagccgcttgcggcttttgtgtggaagaggctctgcttctagcgccagcagtgagcaagggggtgcagccctcccatactctcccaacccggggtcacagcaccgcagggaggacagcgggacgcgcgtcccgaggaggcygccccttcctggcctcggtttccagcccgtgttccgtgggatggctgagaggagtacatgggaccctgtccccaacagtggtgcagagggyacgctggacgctgggcagtggccccagtgaggccatacgcataccagaaggtgggcttctcggaccccaggccaacctcttcttcctccccagataacgtcctcctctcccagccacccggccaactccttctactacccgcggctgaaggccctgcctcccatcgccagggtgacactgctgcggctgcgacagagccccagggccttcatccctcccgccccagtcctgcccagcagggacaatgagattgtagacagcgcctcaggtaacggacatacaggtcacatgggacacacagcagccccgaaccctgccacagggcgaccaccaaacccgaacctaaggctctgagaaattccaagtagggattcgtagtgcgtactgcaagatggtgcctagaagatttaggattctgttgattcacacactgaagatgtgactcttgcacattatttgcagttgaaagcatcttacagggccacagcccagaggaaagaatgaaaggaggctccagacagtacctgagagactctgtcctgtcagacacgcacccacaggtgacctgtgtgtcacagctgacaaggaagcttgctaggatggccctgtgtggccaccgggtgacagctatgctgcagggcacctgtgggggtctcgggacccagccaccacacagctcggggctctgctcacaggcgccttggcctggggcggggcaggtgctgatgagcattctcctagctcttccaggcacctgctggacagggcaggctgggaacgctggggccgagtggcagttccctccctactcagctgggtggcagccactggcctcacggagcgcctgtggtctggagcgcattgctgggtcgtgggtcagggcctgttggctctgggtctctgggtctcacctgatatgggtgtgggacagtcagtgtaggccccagacaacagcggacttcagactttcccgaggaggaactggagcccaccaacctggccatgggccccgtcgtcctccaccctccatgttgctggctggagttgaggcaggtacggggccgccccacacctgccccccaagccatgtggtagggacagatgtcgtcttgaggagcagcagtaattacaagcttactgtcagccgtccctggaagcaagggccaggtcaggtcagacaggaggccgcctggctggcgggaaccactccccagacagagactgtgcccagtcctgggtccctcctcatttgggatgaactgggcctccctgtgccagcctcggtgctgcccctgcccagtgcaggcttgggctcctcactcatttgtccacgcggatgccccattccaagcagatgtccccgagccacttacccaacaggcagacgtgccagcactgttcgtggtgtgcaactggtctggcgggaagagcccctcgtgggcagagggtccagagaggtgcggtttgccccacatttgggggcactgggccacagtgggcaggggagcacgtggccagtgccctgggctaggagagggataaagtcagctgtggccaagcagaagcagtattgcaggggaagggtggggagagactgtgctatgagctctgagcaggaggcaggacatggagagaagggtgggagacggacagagccagctgtgccagccgagggaccagagtgggcagtggggacggagcacagaccaccgcccacaagggtctctcctgtgacttctggcttcccgagggcagaggctgggatgggcatgtggcggctggcacccaggaggctccgccaggtccacgccaagccagcctggctcagctctggcttcctgctcacacgctggatgcctgtccccaggcctcctgacagggctctgcagcattggagaggcttgtggtggggccctcgctgtagaacaggcactgccagtgctcactgactcctcattgcagccagggcaggggcgctcccaccacctcggtttcagtcaggaagctggggggtgctgggatctgccagcagctctgtgtgctccccaggtgggctgcccggggccctggctctctggcttctacaccagtgcccctgcgaagcctcagcgcccaaggtctttgcaagccctgttcctgcatctctggagagggctgctccaggtgtgggcctggccagggcttccagaccagtccaggcactgcacctgcacattgacccccttctccactctctctcatccttcagtagccacaaagctggcagcagggtactcgcagatttgtgaggagagccgagcccttgctgactgtcctcccgtgcacggcagagtgaggcggggctcctggcctccttaggggctgcccgctctgggccacacagccagagaaacactgtccatctggctggcttggcctgtggggtgcaaaagaggtgttttcactttgctttggaaacatggaaattaccaagtgacttaaccataacaccaaatgatgatttttaaatttatgaaaattatggaaccagatgggacacagggaaacgagaacgatactgaaaaggtctgagtcctgtggggggtccaggtcccgcaagacagctaatcaggtgcccctgtctgttattcgggtaaatgtagcagctgggtccaggctcgggcagagcagctttctacagcaggggtgtccgccctctcccggggttcccacggggttcccaggggcctcttactctgccacgatgtgggagttccaccaccacagggacttgagcggcagctccggctcttacgtagaaacgcgcaactccagtccctaggttgtgtccgaggttgctatggtgccatcccatcttgccgctcactctgcgactgtgcggagaaacgcaagtgcccccgaagggtgggcgtggcctctgatgaatgcacacgttggtgggaggtggcttccgtttgtacgaagcgcctcttcacgcgagcgttcacctcggtctcccctttgcttggtccagttccagaaacgccgctggactgcgaggtctccctgtggtcgtcctggggactgtgcggaggccactgtgggaggctcgggaccaagagcaggactcgctacgtccgggtccagcccgccaacaacgggagcccctgccccgagctcgaagaagaggctgagtgcgtccctgataactgcgtctaagaccagagccccgcagcccctggggccccccggagccatggggtgtcgggggctcctgtgcaggctcatgctgcaggcggccgagggcacagggggtttcgcgctgctcctgaccgcggtgaggccgcgccgaccatctctgcactgaagggccctctggtggccggcacgggcattgggaaacagcctcctcctttcccaaccttgcttcttaggggcccccgtgtcccgtctgctctcagcctcctcctcctgcaggataaagtcatccccaaggctccagctactctaaattatgtctccttataagttattgctgctccaggagattgtccttcatcgtccaggggcctggctcccacgtggttgcagatacctcagacctggtgctctaggctgtgctgagcccactctcccgagggcgcatccaagcgggggccacttgagaagtgaataaatggggcggtttcggaagcgtcagtgtttccatgttatggatctctctgcgtttgaataaagactatctctgttgctcaaaaa

SEQ ID NO: 16 - DNA, 4905 bp, Homo sapien
gggagggataggacggggagacaaagaaaggggtgcggcagcactgccaggggaagagggtgatccgacccggggaaggtcgctgggcagggcgagttgggaaagcggcagcccccgccgcccccgcagccccttctcctcctttctcccacgtcctatctgcctctcgctggaggccaggccgtgcagcatcgaagacaggaggaactggagcctcattggccggcccggggcgccggcctcgggcttaaataggagctccgggctctggctgggacccgaccggcctcttgggggagagtccatctgttccgccagagccccggccaaatacagcatcaccttcacgggcaagtggagccagacggccttccccaagcagtaccccctgttccgcccccctgcgcagtggtcttcgctgctgggggccgcgcatagctccgactacagcatgtggaggaagaaccagtacgtcagtaacgggctgcgcgactttgcggagcgcggcgaggcctgggcgctgatgaaggagatcgaggcggcgggggaggcgctgcagagcgtgcacgaggtgttttcggcgcccgccgtccccagcggcaccgggcagacgtcggcggagctggaggtgcagcgcaggcactcgctggtctcgtttgtggtgcgcatcgtgcccagccccgactggttcgtgggcgtggacagcctggacctgtgcgacggggaccgttggcgggaacaggcggcgctggacctgtacccctacgacgccgggacggacagcggcttcaccttctcctcccccaacttcgccaccatcccgcaggacacggtgaccgaggtgagtgggcaccccgcgtgcgcaagggccgctatggcccccgcggtggggacggggctggggcctggctgcaccctcgcctcccagcccaggacagccgcttgcggcttttgtgtggaagaggctctgcttctagcgccagcagtgagcaagggggtgcagccctcccatactctcccaacccggggtcacagcaccgcagggaggacagcgggacgcgcgtcccgaggaggcygccccttcctggcctcggtttccagcccgtgttccgtgggatggctgagaggagtacatgggaccctgtccccaacagtggtgcagagggyacgctggacgctgggcagtggccccagtgaggccatacgcataccagaaggtgggcttctcggaccccaggccaacctcttcttcctccccagataacgtcctcctctcccagccacccggccaactccttctactacccgcggctgaaggccctgcctcccatcgccagggtgacactgctgcggctgcgacagagccccagggccttcatccctcccgccccagtcctgcccagcagggacaatgagattgtagacagcgcctcaggtaacggacatacaggtcacatgggacacacagcagccccgaaccctgccacagggcgaccaccaaacccgaacctaaggctctgagaaattccaagtagggattcgtagtgcgtactgcaagatggtgcctagaagatttaggattctgttgattcacacactgaagatgtgactcttgcacattatttgcagttgaaagcatcttacagggccacagcccagaggaaagaatgaaaggaggctccagacagtacctgagagactctgtcctgtcagacacgcacccacaggtgacctgtgtgtcacagctgacaaggaagcttgctaggatggccctgtgtggccaccgggtgacagctatgctgcagggcacctgtgggggtctcgggacccagccaccacacagctcggggctctgctcacaggcgccttggcctggggcggggcaggtgctgatgagcattctcctagctcttccaggcacctgctggacagggcaggctgggaacgctggggccgagtggcagttccctccctactcagctgggtggcagccactggcctcacggagcgcctgtggtctggagcgcattgctgggtcgtgggtcagggcctgttggctctgggtctctgggtctcacctgatatgggtgtgggacagtcagtgtaggccccagacaacagcggacttcagactttcccgaggaggaactggagcccaccaacctggccatgggccccgtcgtcctccaccctccatgttgctggctggagttgaggcaggtacggggccgccccacacctgccccccaagccatgtggtagggacagatgtcgtcttgaggagcagcagtaattacaagcttactgtcagccgtccctggaagcaagggccaggtcaggtcagacaggaggccgcctggctggcgggaaccactccccagacagagactgtgcccagtcctgggtccctcctcatttgggatgaactgggcctccctgtgccagcctcggtgctgcccctgcccagtgcaggcttgggctcctcactcatttgtccacgcggatgccccattccaagcagatgtccccgagccacttacccaacaggcagacgtgccagcactgttcgtggtgtgcaactggtctggcgggaagagcccctcgtgggcagagggtccagagaggtgcggtttgccccacatttgggggcactgggccacagtgggcaggggagcacgtggccagtgccctgggctaggagagggataaagtcagctgtggccaagcagaagcagtattgcaggggaagggtggggagagactgtgctatgagctctgagcaggaggcaggacatggagagaagggtgggagacggacagagccagctgtgccagccgagggaccagagtgggcagtggggacggagcacagaccaccgcccacaagggtctctcctgtgacttctggcttcccgagggcagaggctgggatgggcatgtggcggctggcacccaggaggctccgccaggtccacgccaagccagcctggctcagctctggcttcctgctcacacgctggatgcctgtccccaggcctcctgacagggctctgcagcattggagaggcttgtggtggggccctcgctgtagaacaggcactgccagtgctcactgactcctcattgcagccagggcaggggcgctcccaccacctcggtttcagtcaggaagctggggggtgctgggatctgccagcagctctgtgtgctccccaggtgggctgcccggggccctggctctctggcttctacaccagtgcccctgcgaagcctcagcgcccaaggtctttgcaagccctgttcctgcatctctggagagggctgctccaggtgtgggcctggccagggcttccagaccagtccaggcactgcacctgcacattgacccccttctccactctctctcatccttcagtagccacaaagctggcagcagggtactcgcagatttgtgaggagagccgagcccttgctgactgtcctcccgtgcacggcagagtgaggcggggctcctggcctccttaggggctgcccgctctgggccacacagccagagaaacactgtccatctggctggcttggcctgtggggtgcaaaagaggtgttttcactttgctttggaaacatggaaattaccaagtgacttaaccataacaccaaatgatgatttttaaatttatgaaaattatggaaccagatgggacacagggaaacgagaacgatactgaaaaggtctgagtcctgtggggggtccaggtcccgcaagacagctaatcaggtgcccctgtctgttattcgggtaaatgtagcagctgggtccaggctcgggcagagcagctttctacagcaggggtgtccgccctctcccggggttcccacggggttcccaggggcctcttactctgccacgatgtgggagttccaccaccacagggacttgagcggcagctccggctcttacgtagaaacgcgcaactccagtccctaggttgtgtccgaggttgctatggtgccatcccatcttgccgctcactctgcgactgtgcggagaaacgcaagtgcccccgaagggtgggcgtggcctctgatgaatgcacacgttggtgggaggtggcttccgtttgtacgaagcgcctcttcacgcgagcgttcacctcggtctcccctttgcttggtccagttccagaaacgccgctggactgcgaggtctccctgtggtcgtcctggggactgtgcggaggccactgtgggaggctcgggaccaagagcaggactcgctacgtccgggtccagcccgccaacaacgggagcccctgccccgagctcgaagaagaggctgagtgcgtccctgataactgcgtctaagaccagagccccgcagcccctggggccccccggagccatggggtgtcgggggctcctgtgcaggctcatgctgcaggcggccgagggcacagggggtttcgcgctgctcctgaccgcggtgaggccgcgccgaccatctctgcactgaagggccctctggtggccggcacgggcattgggaaacagcctcctcctttcccaaccttgcttcttaggggcccccgtgtcccgtctgctctcagcctcctcctcctgcaggataaagtcatccccaaggctccagctactctaaattatgtctccttataagttattgctgctccaggagattgtccttcatcgtccaggggcctggctcccacgtggttgcagatacctcagacctggtgctctaggctgtgctgagcccactctcccgagggcgcatccaagcgggggccacttgagaagtgaataaatggggcggtttcggaagcgtcagtgtttccatgttatggatctctctgcgtttgaataaagactatctctgttgctcaaaaa

SEQ ID NO: 17 - DNA, 5093 bp, Homo sapien
cggctgctcccctctgtgctcccaggtgatggaaaaccccagcccggccgccgccctgggcaaggccctctgcgctctcctcctggccactctcggcgccgccggccagcctcttgggggagagtccatctgttccgccagagccccggccaaatacagcatcaccttcacgggcaagtggagccagacggccttccccaagcagtaccccctgttccgcccccctgcgcagtggtcttcgctgctgggtaagtacagccccctcctcgcctcctgctccaccaggagggctgcggcgccggagccccccgcacagctgcacggcggcgcttcccagtctggggcgtgctgacgtcgggagactctaacaccagaatgtttgccgagcgcctgcggtgtgcggttccggggatgcggtgggggcagggggcgctcacggggagggcgcaggtgggtcgcggcaggggcagccacagggtgtcacggtccgacgtgactgggggccatggttccctgcgggcggcggggagggatttcctggggcgccccctggaatccaagcccgaccgcagtgtctgaccatggtccgcggcgcggccgggtggtcctgcaggggccgcgcatagctccgactacagcatgtggaggaagaaccagtacgtcagtaacgggctgcgcgactttgcggagcgcggcgaggcctgggcgctgatgaaggagatcgaggcggcgggggaggcgctgcagagcgtgcacgaggtgttttcggcgcccgccgtccccagcggcaccgggcagacgtcggcggagctggaggtgcagcgcaggcactcgctggtctcgtttgtggtgcgcatcgtgcccagccccgactggttcgtgggcgtggacagcctggacctgtgcgacggggaccgttggcgggaacaggcggcgctggacctgtacccctacgacgccgggacggacagcggcttcaccttctcctcccccaacttcgccaccatcccgcaggacacggtgaccgaggtgagtgggcaccccgcgtgcgcaagggccgctatggcccccgcggtggggacggggctggggcctggctgcaccctcgcctcccagcccaggacagccgcttgcggcttttgtgtggaagaggctctgcttctagcgccagcagtgagcaagggggtgcagccctcccatactctcccaacccggggtcacagcaccgcagggaggacagcgggacgcgcgtcccgaggaggcygccccttcctggcctcggtttccagcccgtgttccgtgggatggctgagaggagtacatgggaccctgtccccaacagtggtgcagagggyacgctggacgctgggcagtggccccagtgaggccatacgcataccagaaggtgggcttctcggaccccaggccaacctcttcttcctccccagataacgtcctcctctcccagccacccggccaactccttctactacccgcggctgaaggccctgcctcccatcgccagggtgacactgctgcggctgcgacagagccccagggccttcatccctcccgccccagtcctgcccagcagggacaatgagattgtagacagcgcctcaggtaacggacatacaggtcacatgggacacacagcagccccgaaccctgccacagggcgaccaccaaacccgaacctaaggctctgagaaattccaagtagggattcgtagtgcgtactgcaagatggtgcctagaagatttaggattctgttgattcacacactgaagatgtgactcttgcacattatttgcagttgaaagcatcttacagggccacagcccagaggaaagaatgaaaggaggctccagacagtacctgagagactctgtcctgtcagacacgcacccacaggtgacctgtgtgtcacagctgacaaggaagcttgctaggatggccctgtgtggccaccgggtgacagctatgctgcagggcacctgtgggggtctcgggacccagccaccacacagctcggggctctgctcacaggcgccttggcctggggcggggcaggtgctgatgagcattctcctagctcttccaggcacctgctggacagggcaggctgggaacgctggggccgagtggcagttccctccctactcagctgggtggcagccactggcctcacggagcgcctgtggtctggagcgcattgctgggtcgtgggtcagggcctgttggctctgggtctctgggtctcacctgatatgggtgtgggacagtcagtgtaggccccagacaacagcggacttcagactttcccgaggaggaactggagcccaccaacctggccatgggccccgtcgtcctccaccctccatgttgctggctggagttgaggcaggtacggggccgccccacacctgccccccaagccatgtggtagggacagatgtcgtcttgaggagcagcagtaattacaagcttactgtcagccgtccctggaagcaagggccaggtcaggtcagacaggaggccgcctggctggcgggaaccactccccagacagagactgtgcccagtcctgggtccctcctcatttgggatgaactgggcctccctgtgccagcctcggtgctgcccctgcccagtgcaggcttgggctcctcactcatttgtccacgcggatgccccattccaagcagatgtccccgagccacttacccaacaggcagacgtgccagcactgttcgtggtgtgcaactggtctggcgggaagagcccctcgtgggcagagggtccagagaggtgcggtttgccccacatttgggggcactgggccacagtgggcaggggagcacgtggccagtgccctgggctaggagagggataaagtcagctgtggccaagcagaagcagtattgcaggggaagggtggggagagactgtgctatgagctctgagcaggaggcaggacatggagagaagggtgggagacggacagagccagctgtgccagccgagggaccagagtgggcagtggggacggagcacagaccaccgcccacaagggtctctcctgtgacttctggcttcccgagggcagaggctgggatgggcatgtggcggctggcacccaggaggctccgccaggtccacgccaagccagcctggctcagctctggcttcctgctcacacgctggatgcctgtccccaggcctcctgacagggctctgcagcattggagaggcttgtggtggggccctcgctgtagaacaggcactgccagtgctcactgactcctcattgcagccagggcaggggcgctcccaccacctcggtttcagtcaggaagctggggggtgctgggatctgccagcagctctgtgtgctccccaggtgggctgcccggggccctggctctctggcttctacaccagtgcccctgcgaagcctcagcgcccaaggtctttgcaagccctgttcctgcatctctggagagggctgctccaggtgtgggcctggccagggcttccagaccagtccaggcactgcacctgcacattgacccccttctccactctctctcatccttcagtagccacaaagctggcagcagggtactcgcagatttgtgaggagagccgagcccttgctgactgtcctcccgtgcacggcagagtgaggcggggctcctggcctccttaggggctgcccgctctgggccacacagccagagaaacactgtccatctggctggcttggcctgtggggtgcaaaagaggtgttttcactttgctttggaaacatggaaattaccaagtgacttaaccataacaccaaatgatgatttttaaatttatgaaaattatggaaccagatgggacacagggaaacgagaacgatactgaaaaggtctgagtcctgtggggggtccaggtcccgcaagacagctaatcaggtgcccctgtctgttattcgggtaaatgtagcagctgggtccaggctcgggcagagcagctttctacagcaggggtgtccgccctctcccggggttcccacggggttcccaggggcctcttactctgccacgatgtgggagttccaccaccacagggacttgagcggcagctccggctcttacgtagaaacgcgcaactccagtccctaggttgtgtccgaggttgctatggtgccatcccatcttgccgctcactctgcgactgtgcggagaaacgcaagtgcccccgaagggtgggcgtggcctctgatgaatgcacacgttggtgggaggtggcttccgtttgtacgaagcgcctcttcacgcgagcgttcacctcggtctcccctttgcttggtccagttccagaaacgccgctggactgcgaggtctccctgtggtcgtcctggggactgtgcggaggccactgtgggaggctcgggaccaagagcaggactcgctacgtccgggtccagcccgccaacaacgggagcccctgccccgagctcgaagaagaggctgagtgcgtccctgataactgcgtctaagaccagagccccgcagcccctggggccccccggagccatggggtgtcgggggctcctgtgcaggctcatgctgcaggcggccgagggcacagggggtttcgcgctgctcctgaccgcggtgaggccgcgccgaccatctctgcactgaagggccctctggtggccggcacgggcattgggaaacagcctcctcctttcccaaccttgcttcttaggggcccccgtgtcccgtctgctctcagcctcctcctcctgcaggataaagtcatccccaaggctccagctactctaaattatgtctccttataagttattgctgctccaggagattgtccttcatcgtccaggggcctggctcccacgtggttgcagatacctcagacctggtgctctaggctgtgctgagcccactctcccgagggcgcatccaagcgggggccacttgagaagtgaataaatggggcggtttcggaagcgtcagtgtttccatgttatggatctctctgcgtttgaataaagactatctctgttgctcaaaaa

SEQ ID NO: 18 - DNA, 2274 bp, Homo sapien
gggagggataggacggggagacaaagaaaggggtgcggcagcactgccaggggaagagggtgatccgacccggggaaggtcgctgggcagggcgagttgggaaagcggcagcccccgccgcccccgcagccccttctcctcctttctcccacgtcctatctgcctctcgctggaggccaggccgtgcagcatcgaagacaggaggaactggagcctcattggccggcccggggcgccggcctcgggcttaaataggagctccgggctctggctgggacccgaccgctgccggccgcgctcccgctgctcctgccgggtgatggaaaaccccagcccggccgccgccctgggcaaggccctctgcgctctcctcctggccactctcggcgccgccggccagcctcttgggggagagtccatctgttccgccagagccccggccaaatacagcatcaccttcacgggcaagtggagccagacggccttccccaagcagtaccccctgttccgcccccctgcgcagtggtcttcgctgctgggggccgcgcatagctccgactacagcatgtggaggaagaaccagtacgtcagtaacgggctgcgcgactttgcggagcgcggcgaggcctgggcgctgatgaaggagatcgaggcggcgggggaggcgctgcagagcgtgcacgaggtgttttcggcgcccgccgtccccagcggcaccgggcagacgtcggcggagctggaggtgcagcgcaggcactcgctggtctcgtttgtggtgcgcatcgtgcccagccccgactggttcgtgggcgtggacagcctggacctgtgcgacggggaccgttggcgggaacaggcggcgctggacctgtacccctacgacgccgggacggacagcggcttcaccttctcctcccccaacttcgccaccatcccgcaggacacggtgaccgaggtgagtgggcaccccgcgtgcgcaagggccgctatggcccccgcggtggggacggggctggggcctggctgcaccctcgcctcccagcccaggacagccgcttgcggcttttgtgtggaagaggctctgcttctagcgccagcagtgagcaagggggtgcagccctcccatactctcccaacccggggtcacagcaccgcagggaggacagcgggacgcgcgtcccgaggaggcygccccttcctggcctcggtttccagcccgtgttccgtgggatggctgagaggagtacatgggaccctgtccccaacagtggtgcagagggyacgctggacgctgggcagtggccccagtgaggccatacgcataccagaaggtgggcttctcggaccccaggccaacctcttcttcctccccagataacgtcctcctctcccagccacccggccaactccttctactacccgcggctgaaggccctgcctcccatcgccagggtgacactgctgcggctgcgacagagccccagggccttcatccctcccgccccagtcctgcccagcagggacaatgagattgtagacagcgcctcagttccagaaacgccgctggactgcgaggtctccctgtggtcgtcctggggactgtgcggaggccactgtgggaggctcgggaccaagagcaggactcgctacgtccgggtccagcccgccaacaacgggagcccctgccccgagctcgaagaagaggctgagtgcgtccctgataactgcgtctaagaccagagccccgcagcccctggggccccccggagccatggggtgtcgggggctcctgtgcaggctcatgctgcaggcggccgagggcacagggggtttcgcgctgctcctgaccgcggtgaggccgcgccgaccatctctgcactgaagggccctctggtggccggcacgggcattgggaaacagcctcctcctttcccaaccttgcttcttaggggcccccgtgtcccgtctgctctcagcctcctcctcctgcaggataaagtcatccccaaggctccagctactctaaattatgtctccttataagttattgctgctccaggagattgtccttcatcgtccaggggcctggctcccacgtggttgcagatacctcagacctggtgctctaggctgtgctgagcccactctcccgagggcgcatccaagcgggggccacttgagaagtgaataaatggggcggtttcggaagcgtcagtgtttccatgttatggatctctctgcgtttgaataaagactatctctgttgctcaaaaa

SEQ ID NO: 19 - DNA, 323 bp, Homo sapien
gcaaagctctcctgcggcgcttccgagacccccatcagcggaatggacggcgcggggttagatcgcccgtgcgcctgcgagcgaccaggggtaacgggcaggttttcactcattgtccttcatcgtccaggggcctggctcccacgtggttgcagatacctcagacctggtgctctaggctgtgctgagcccactctcccgagggcgcatccaagcgggggccacttgagaagtgaataaatggggcggtttcggaagcgtcagtgtttccatgttatggatctctctgcgtttgaataaagactatctctgttgctcaaaaa

SEQ ID NO: 20 - DNA, 830 bp, Homo sapien
gttcttttcctggctagtcaaagcacaccttacgtacattctgaagccgtctcttatatgattcatttttttcactgtagataagacttttatggatggattgtttttctcaaataatattatcgctttgtgactaaagtaaagattattaattcctgaggcaagaagatataaaagctccagaaacgttgactgggaccactggagacactgaagaaggcaggggcccttagagtcttggttgccaaacagatttgcagatcaaggagaacccaggagtttcaaagaagcgctagtaaggtctctgagatccttgcactagctacatcctcagggtaggaggaagatggcttccagaagcatgcggctgctcctattgctgagctgcctggccaaaacaggagtcctgggtgatatcatcatgagacccagctgtgctcctggatggttttaccacaagtccaattgctatggttacttcaggaagctgaggaactggtctgatgccgagctcgagtgtcagtcttacggaaacggagcccacctggcatctatcctgagtttaaaggaagccagcaccatagcagagtacataagtggctatcagagaagccagccgatatggattggcctgcacgacccacagaccagccactcaactcctgcttgtttttcctttggccataggaaggtttaccagtagaatccttgctaggttgatgtgggccatacattcctttaataaaccattgtgtacctaagaggttgctgtgttccagttcagtaatggtgaatgtggaaaagtgaaataagaccaagaaatacaccca

SEQ ID NO: 21 - DNA, 3414 bp, Homo sapien
acctggcggcgcagtctcgcgggatcgctcagctctcgctccccgtgcggctctcgaggcagctccagtcccggacgcaaccccggagccgtctcaggtccctggggggaacggtgggttagacggggacgggaagggacagcggccttcgaccgccccccgagtaattgacccaggactcattttcaggaaagcctgaaaatgagtaaaatagtgaaatgaggaatttgaacattttatctttggatggggatcttctgaggatgcaaagagtgattcatccaagccatgtggtaaaatcaggaatttgaagaaaatggagatgtttacatttttgttgacgtgtatttttctacccctcctaagagggcacagtctcttcacctgtgaaccaattactgttcccagatgtatgaaaatggcctacaacatgacgtttttccctaatctgatgggtcattatgaccagagtattgccgcggtggaaatggagcattttcttcctctcgcaaatctggaatgttcaccaaacattgaaactttcctctgcaaagcatttgtaccaacctgcatagaacaaattcatgtggttccaccttgtcgtaaactttgtgagaaagtatattctgattgcaaaaaattaattgacacttttgggatccgatggcctgaggagcttgaatgtgacagattacaatactgtgatgagactgttcctgtaacttttgatccacacacagaatttcttggtcctcagaagaaaacagaacaagtccaaagagacattggattttggtgtccaaggcatcttaagacttctgggggacaaggatataagtttctgggaattgaccagtgtgcgcctccatgccccaacatgtattttaaaagtgatgagctagagtttgcaaaaagttttattggaacagtttcaatattttgtctttgtgcaactctgttcacattccttacttttttaattgatgttagaagattcagatacccagagagaccaattatatattactctgtctgttacagcattgtatctcttatgtacttcattggatttttgctgggcgatagcacagcctgcaataaggcagatgagaagctagaacttggtgacactgttgtcctaggctctcaaaataaggcttgcaccgttttgttcatgcttttgtattttttcacaatggctggcactgtgtggtgggtgattcttaccattacttggttcttagctgcaggaagaaaatggagttgtgaagccatcgagcaaaaagcagtgtggtttcatgctgttgcatggggaacaccaggtttcctgactgttatgcttcttgctatgaacaaagttgaaggagacaacattagtggagtttgctttgttggcctttatgacctggatgcttctcgctactttgtactcttgccactgtgcctttgtgtgtttgttgggctctctcttcttttagctggcattatttccttaaatcatgttcgacaagtcatacaacatgatggccggaaccaagaaaaactaaagaaatttatgattcgaattggagtcttcagcggcttgtatcttgtgccattagtgacacttctcggatgttacgtctatgagcaagtgaacaggattacctgggagataacttgggtctctgatcattgtcgtcagtaccatatcccatgtccttatcaggcaaaagcaaaagctcgaccagaattggctttatttatgataaaatacctgatgacattaattgttggcatctctgctgtcttctgggttggaagcaaaaagacatgcacagaatgggctgggttttttaaacgaaatcgcaagagagatccaatcagtgaaagtcgaagagtactacagggattagtccaaagagtgatattactgacactggcctggcacagagcaacaatttgcaggtccccagttcttcagaaccaagcagcctcaaaggttccacatctctgcttgttcacccggtttcaggagtgagaaaagagcagggaggtggttgtcattcagatacttgaagaacattttctctcgttactcagaagcaaatttgtgttacactggaagtgacctatgcactgttttgtaagaatcactgttacgttcttcttttgcacttaaagttgcattgcctactgttatactggaaaaaatagagttcaagaataatatgactcatttcacacaaaggttaatgacaacaatatacctgaaaacagaaatgtgcaggttaataatatttttttaatagtgtgggaggacagagttagaggaatcttccttttctatttatgaagattctactcttggtaagagtattttaagatgtactatgctattttacttttttgatataaaatcaagatatttctttgctgaagtatttaaatcttatccttgtatctttttatacatatttgaaaataagcttatatgtatttgaacttttttgaaatcctattcaagtatttttatcatgctattgtgatattttagcactttggtagcttttacactgaatttctaagaaaattgtaaaatagtcttcttttatactgtaaaaaaagatataccaaaaagtcttataataggaatttaactttaaaaacccacttattgataccttaccatctaaaatgtgtgatttttatagtctcgttttaggaatttcacagatctaaattatgtaactgaaataaggtgcttactcaaagagtgtccactattgattgtattatgctgctcactgatccttctgcatatttaaaataaaatgtcctaaagggttagtagacaaaatgttagtcttttgtatattaggccaagtgcaattgacttcccttttttaatgtttcatgaccacccattgattgtattataaccacttacagttgcttatattttttgttttaacttttgttttttaacatttagaatattacattttgtattatacagtacctttctcagacattttgtagaattcatttcggcagctcactaggattttgctgaacattaaaaagtgtgatagcgatattagtgccaatcaaatggaaaaaaggtagtcttaataaacaagacacaacgtttttatacaacatactttaaaatattaaggagttttcttaattttgtttcctattaagtattattctttgggcaagattttctgatgcttttgattttctctcaatttagcatttgcttttggtttttttctctatttagcattctgttaaggcacaaaaactatgtactgtatgggaaatgttgtaaatattaccttttccacattttaaacagacaactttgaatacaaaaactttgttttgtgtgatcttttcattaataaaattatctttgtataagaa

SEQ ID NO: 22 - DNA, 2090 bp, Homo sapien
  misc_feature (73)..(73): n=a, c, g or t
aggatctaggttagggaggacagtaacagcacgtacgtgtgtcagcgtccacgtctgcacagatgctgatgcnagagtcagtcaggtctcaaaaagcctccaggcccattgagaaaacattttcaaggcaaaggcagccccgagaaccacaggtgtacaccctgcccccatcccgggatgagctgaccaagaaccaggtcagcctgacctgcctggtcaaaggcttctatcccagcgacatcgccgtggagtgggagagcaatgggcagccggagaacaactacaagaccacgcctcccgtgctggactccgacggctccttcttcctctacagcaagctcaccgtggacaagagcaggtggcagcaggggaacgtcttctcatgctccgtgatgcatgaggctctgcacaaccactacacgcagaagagcctctccctgtccccggagctgcaactggaggagagctgtgcggaggcgcaggacggggagctggacgggctgtggacgaccatcaccatcttcatcacactcttcctgttaagcgtgtgctacagtgccaccgtcaccttcttcaaggtgaagtggatcttctcctcggtggtggacctgaagcagaccatcatccccgactacaggaacatgatcggacagggggcctagggccaccctctgcggggtgtccagggccgcccagaccccacacaccagccatgggccatgctcagccaccacccaggccacacctgcccccgacctcaccgccctcaaccccatggctctctggcctcgcagttgccctctgaccctgacacacctgacacgccccccttccagaccctgtgcatagcaggtctaccccagacctccgctgcttggtgcatgcagggcactgggggccaggtgtcccctcagcaggacgtccttgccctccggaccacaaggtgctcacacaaaaggaggcagtgaccggtatcccaggcccccacccaggcaggagctggccctggagccaaccccgtccacgccagcctcctgaacacaggcgtggtttccagatggtgagtgggagcatcagccgccaaggtagggaagccacagcaccatcaggccctgttggggaggcttccgagagctgcgaaggctcactcagacggccttcctcccagcccgcagccagccagcctccattccgggcactcccgtgaactcctgacatgaggaatgaggttgttctgatttcaagcaaagaacgctgctctctggctcctgggaacagtctcggtgccagcaccaccccttggctgcctgcccacactgctggattctcgggtggaactggacccgcagggacagccagccccagagtccgcactggggagagaaggggccaggcccaggacactgccacctcccacccactccagtccaccgagatcactcagagaagagcctgggccatgtggccgctgcaggagccccacagtgcaagggtgaggatagcccaaggaagggctgggcatctgcccagacaggcctcccagagaaggctggtgaccaggtcccaggcgggcaagactcagccttggtggggcctgaggacagaggaggcccaggagcatcggggagagaggtggagggacaccgggagagccaggagcgtggacacagccagaactcatcacagaggctggcgtccagtcccgggtcacgtgcagcaggaacaagcagccactctgggggcaccaggtggagaggcaagacgacaaagagggtgcccgtgttcttgcgaaagcggggctgctggccacgagtgctggacagaggcccccacgctctgctgcccccatcacgccgttccgtgactgtcacgcagaatctgcagacaggaagggagactcgagcgggagtgcggccagagcctgcctcggccgtcagggaggactcccgggctcactcgaaggaggtgccaccatttcagctttggtagcttttcttcttcttttaaattttctaaagctcattaattgtctttgatgtttcttttgtgatgacaataaaatatcctttttaagtcttgtacttcgtgat

SEQ ID NO: 23 - DNA, 538 bp, Homo sapien
cccgaggattctgtcgctcggaccatcaccagatggttttatcatcagctgatccccacattcggcattaaaaatagaattcaaaacccggacgtttaatccatcctgctttcaccgttgacacgacctgtggtatactatgtgtcttgctctgcaatctgtgtagcaaagcacagtttcatgcccatcgtccgagcggagcgatcacttcaggacctgattccagccccatctctgaagccaggtcccctctgcagcagaacttccaggacaacaattccagggtcacagtggtatgtggtaggcctggccgggaatgcaattactcgagagaagacaaagaccggcaaaagatgtatgccaccatctatgagctgaaagaagacaagagctacaatgtcacctccgtcctgtttaggaaaaagaagtgtgactactggatcaggacttttgttccaggttgccaagcccggcgaagttcacgctgggcaacaattaagagtaaccctggattaacgagttacctcgtccgagcgga

SEQ ID NO: 24 - DNA, 316 bp, Homo sapien
gctctgcatgctggggctggtcmtgrscaccgtgggctccgggacgcagctccaggatccctggagtgccttggtgtttcaagcccctgcaggaagcagaatgcaccttctgaggcacctccagctgcccccggccgggggatgcgaggctcggagcacccttgcccggctgtgattgctgccaggcactgttcatctcagcttttctgtccctttgctcccggcaagcgcttctgctgaaagttcatatctggagcctgatgtcttaacgaataaaggtcccatgctccacccgaggacagttcttcgtgcctga

SEQ ID NO: 25 - DNA, 509 bp, Homo sapien
taaactcgcggccgcgtcgactttttttttcgggtggagcatgggacctttattcgttaagacatcaggctccagatatgaactttcagcagaagcgcttgccgggagcaaagggacagaaaggctgaggagtacgtgggcctgtctgcaaaccagtgtgccgtgccagccaaggacagggtggactgcggctacccccatgtcacccccaaggagtgcaacaaccggggctgctgctttgactccaggatccctggagtgccttggtgtttcaagcccctgcaggaagcagaatgcaccttctgaggcacctccagctgcccccggccgggggatgcgaggctcggagcacccttgcccggctgtgattgctgccaggcactgttcatctcagcttttctgtccctttgctcccggcaagcgcttctgctgaaagttcatatctggagcctgatgtcttaacgaataaaggtcccatgctccacccgaggacagttcttcgtgcctga

SEQ ID NO: 26 - DNA, 517 bp, Homo sapien
taaactcgcggccgcgtcgactttttttttcgggtggagcatgggacctttattcgttaagacatcaggctccagatatgaactttcagcagaagcgcttgccgggagcaaagggacagaaaggctgaggagtacgtgggcctgtctgcaaaccagtgtgccgtgccagccaaggacagggtggactgcggctacccccatgtcacccccaaggagtgcaacaaccggggctgctgctttgactccaggatccctggagtgccttggtgtttcaagcccctgcaggaagcagaatgcaccttctgaggcacctccagctgcccccggccgggggatgcgaggctcggagcacccttgcccggctgtgattgctgccaggcacaatgttctataatcaagctatattcatagtccactttagctaaccgaacaaagcgaatttataaataaaagattctatataatggaagcaataatagtaattaaaagaaataaaagagtacacatgctaccaaca

SEQ ID NO: 27 - DNA, 1094 bp, Homo sapien
tgaaatggagctgagatggctggagccagggtccagctagaggacaatgcccacgtggcatcttcggggccctggaggagggagtgggaggaggatgggaggggtgaggtgtcagttccccattggtctaggccaggtgttctgtggcggtccccacaccacacaagacacacacacatctgcacctcaaccacagactacacttgctgaactggctcctggggccatgaggctgtcactgccactgctgctgctgctgctgggagcctgggccatcccagggggcctcggggacagggcgccactcacagccacagccccacaactggatgatgaggagatgtactcagcccacatgcccgctcacctgcgctgtgatgcctgcagagctgtggcttaccagccaggcccatccttgagtccggactccctccccaaccctgacggggcggctttggctatgtgtacatggtgcaagtgcacacgtgtgagcgcctgcacgtgatgtggcaaaatctggcaaaggcagagaccaaacttcatacctcaaactctggggggcggcgggagctgagcgagttggtctacacggatgtcctggaccggagctgctcccggaactggcaggactacggagttcgagaagtggaccaagtgaaacgtctcacaggcccaggacttagcgaggggccagagccaagcatcagcgtgatggtcacagggggcccctggcctaccaggctctccaggacatgtttgcactacttgggggagtttggagaagaccagatctatgaagcccaccaacaaggccgaggggctctggaggcattgctatgtgggggaccccagggggcctgctcagagaaggtgtcagccacaagagaagagctctagtcctggactctaccctcctctgaaagaagctggggcttgctctgacggtctccactcccgtctgcaggcagccaggagggcaggaagcccttgctctgtgctgccatcctgcctccctcctccagcctcagggcactcgggcctgggtgggagtcaacgccttcccctctggactcaaataaaacccagtgacctca

SEQ ID NO: 28 - DNA, 787 bp, Homo sapien
cactgttcttggcccttctcccgacccgtagccctgctctgctacgactgcgtgggtgagtcgtctataaaaactcatctctgcgcgtctcttcgccacattcgcttcctgctttcggtgtgtctgttgtgtcttgttgcgggcaccgcagtcgccgtgaagatggcgtctaccagccgtttggatgctcttccaagagtcacatgtccaaaccatccagatgcgattttagtggaggactacagagccggtgatatgatctgtcctgaatgtggcttggttgtaggtgaccgggttattgatgtgggatctgaatggcgaactttcagcaatgacaaagcaacaaaagatccatctcgagttggagattctcagaatcctcttctgagtgatggagatttgtctaccatgattggcaagggcacaggagctgcaagttttgacgaatttggcaattctaagtacctcggccgcgaccacgcctcgcggccgaggtcgcatcctagccgccgactcacacaaggcagagttgccatggagaaaattccagtgtcagcattcttgctccttgtggccctctcctacactctggccagagataccacagtcaaacctggagccaaaaaggacacaaaggactctcgacccaaactgccccagaccctctccagaggttggggtgaccaaactcatctggactcagacatatgaagaagctctatataaatccaagacaagcaacaaacccttgatgattattcatcacttggatgagtgcccacacagt

SEQ ID NO: 29 - DNA, 3142 bp, Homo sapien
ggggccggcgaggaatggcggtatttgtgagaggagtcggcgtttgaagaggtggaactcctagatatctccaacacaccagagtctagcattaactatggagacaccccaaagtcttgtactaagtcttctaaaagctccactccagttccttcaaagcagtcagcaaggtggcaagttgcaaaagagctttatcaaactgaaagtaattatgttaatatattggcaacaattattcagttatttcaagtaccattggaagaggaaggacaacgtggtggacctatccttgcaccagaggagattaagactatttttggtagcatcccagatatctttgatgtacacactaagataaaggatgatcttgaagaccttatagttaattgggatgagagcaaaagcattggtgacatttttctgaaatattcaaaagatttggtaaaaacctaccctccctttgtaaacttctttgaaatgagcaaggaaacaattattaaatgtgaaaaacagaaaccaagatttcatgcttttctcaagataaaccaagcaaaaccagaatgtggacggcagagccttgttgaacttcttatccgaccagtacagaggttacccagtgttgcattacttttaaatgatcttaagaagcatacagctgatgaaaatccagacaaaagcactttagaaaaagctattggatcactgaaggaagtaatgacgcatattaatgaggataagagaaaaacagaagctcaaaagcaaatttttgatgttgtttatgaagtagatggatgcccagctaatcttttatcttctcaccgaagcttagtacagcgggttgaaacaatttctctaggtgagcacccctgtgacagaggagaacaagtaactctcttcctcttcaatgattgcctagagatagcaagaaaacggcacaaggttattggcacttttaggagtcctcatggccaaacccgacccccagcttctcttaagcatattcacctaatgcctctttctcagattaagaaggtattggacataagagagacagaagattgccataatgcttttgccttgcttgtgaggccaccaacagagcaggcaaatgtgctactcagtttccagatgacatcagatgaacttccaaaagaaaactggctaaagatgctgtgtcgacatgtagctaacaccatttgtaaagcagatgctgagaatcttatttatactgctgatccagaatcctttgaagtaaatacaaaagatatggacagtacattgagtagagcatcaagagcaataaaaaagacttcaaaaaaggttacaagagcattctctttctccaaaactccaaaaagagctcttcgaagggctcttatgacatcccacggctcagtggagggaagaagtccttccagcaatgataagcatgtaatgagtcgtctttctagcacatcatcattagcaattacccattctgtttccacaagcaatgtaattggatttactaagcatgtttatgttcagcgcctaaactctactggtgggcgctctcagtactcctggtttcaatctgtacgtcattctgctttccgagctagtttttcagagatactagaaggaaatactgatttttcaaatttcaaaaaagttctttccaagtcatctttgacatttgtgaagaattaggagatttgccaaccactaatggaaacaagcctcatgaagtttaatggtatcccttctccctcccttgtcagccttccttccttctttgaaaggagaagtcatacgttaagtagatctacaactcatttgatatgaagcgttaccaaaatcttaaattatagaaatgtatagacacctcatactcaaataagaaactgacttaaatggtacttgtaattagcacttggtgaaagctggaaggaagataaataacactaaactatgctatttgatttttcttcttgaaagagtaaggtttacctgttacattttcaagttaattcatgtaaaaaatgatagtgattttgatgtaatttatctcttgtttgaatctgtcattcaaaggccaataatttaagttgctatcagctgatattagtagctttgcaaccctgatagagtaaataaattttatgggcgggtgccaaatactgctgtgaatctatttgtatagtatccatgaatgaatttatggaaatagatatttgtgcagctcaatttatgcagagattaaatgacatcataatactggatgaaaacttgcatagaattctgattaaatagtgggtctgtttcacatgtgcagtttgaagtatttaaataaccactcctttcacagtttattttcttctcaagcgttttcaagatctagcatgtggattttaaaagatttgccctcattaacaagaataacatttaaaggagattgtttcaaaatatttttgcaaattgagataaggacagaaagattgagaaacattgtatattttgcaaaaacaagatgtttgtagctgtttcagagagagtacggtatatttatggtaattttatccactagcaaatcttgatttagtttgatagtgtgtggaattttattttgaaggataagaccatgggaaaattgtggtaaagactgtttgtacccttcatgaaataattctgaagttgccatcagttttactaatcttctgtgaaatgcatagatatgcgcatgttcaactttttattgtggtcttataattaaatgtaaaattgaaaattcatttgctgtttcaaagtgtgatatctttcacaatagcctttttatagtcagtaattcagaataatcaagttcatatggataaatgcatttttatttcctatttctttagggagtgctacaaatgtttgtcacttaaatttcaagtttctgttttaatagttaactgactatagattgttttctatgccatgtatgtgccacttctgagagtagtaaatgactctttgctacattttaaaagcaattgtattagtaagaactttgtaaataaatacctaaaacccaagtgtaaaaaaaaaaaaggggggcgtaaagatatccaaggggcaaattgaggtacaagttttttacaagggcccaggggggaataaa

SEQ ID NO: 30 - DNA, 574 bp, Homo sapien
  misc_feature (22)..(22): n=a, c, g or t
  misc_feature (286)..(286): n=a, c, g or t
  misc_feature (290)..(290): n=a, c, g or t
  misc_feature (363)..(364): n=a, c, g or t
  misc_feature (370)..(370): n=a, c, g or t
  misc_feature (397)..(397): n=a, c, g or t
  misc_feature (400)..(400): n=a, c, g or t
  misc_feature (405)..(405): n=a, c, g or t
  misc_feature (430)..(430): n=a, c, g or t
acagcccagggatttcggacgntcttggaattagtcataaactaccagcaactctgcatctactggacaaagtattatgactttaaaaaccccattattgaaaagtacctgagaaggcagctcacgaaaacccaggccctgtgattcctggacccggcggacccttaccagggaaaacttgggttggtgggaggaccaaaagggtttgggaggccagcttggccacaaagaagcttgaggccctggcttgaatctaccccaatggcctttaaggaaattggggatnggtncccccagtgaagctccctggattctgcctggtgagaccctcctgctttccttccctgcccattccatcccctnncccctntccatgaagccttgagacatattagcnggngaccnttctttccaaagaacttacctcttncaaaggccatttatattcatatagtgacaggctgtgctccatattttacagtcattttggtcacaatcgagggtttctggaattttcacatcccttgtccagaattcattcccctaagagtaataataaataatctctaacacc

SEQ ID NO: 31 - DNA, 961 bp, Homo sapien
  misc_feature (193)..(193): n=a, c, g or t
ctgatcaggggtggcacgaagctgtgagtctctgcttctcctactgagtggtgttcccgagcgttgtgtctcgtgtaccgttttgccacacagtggggactttcgacagcgcttgggatcaccctttggttaacggctgggggtctcttcagtagtctaactccctttatgttacacagtggttggtcccctncgcgtacatagacctgtccggcctgtgtcttacctctcccggggtcccagtcccatccgtgtgaagaggtcccccccctgaatattcccccattacatgagcgagcactcgctgaaggcaggtgccgacatcacgccgcgcgaaggtgatgagcttgcccggctgccctacctacggacctggttccgcacccgcagcgccatcatcctgcacctcagcaacggcagcgtcagatccacttcttcccggatcccccccagctcatcttgggccccctgatggcaacccgtgacctacatcgacgagaatcgggaattccgcacattccgcctgagttctcctggaggagtacggctgctgcaaggagctggccaaccggctccgctacgcccgcactatggtggaacacagctgctgagctcacgctcggccagcaaccgtttcaaggcctcctaatagctgccctcccctccggagctggtgccctcctcactcccacctgcatctggggcccatactggttggctcccgcggtgccatgtctgcasgtgtgccccccasgccccggtggctgggsrcagagsctgcatcastccttgcacggtgggggttgctgtataagttatttttgtacatgttcgggtgtgggttctacagccttgtccccctccccctcaaccccaccatatgaattgtacagaatatttctattgaattcggaactgtcctttccttggctttatgcacattaaacagatgtgaatatta

SEQ ID NO: 32 - DNA, 960 bp, Homo sapien
  misc_feature (193)..(193): n=a, c, g or t
ctgatcaggggtggcacgaagctgtgagtctctgcttctcctactgagtggtgttcccgagcgttgtgtctcgtgtaccgttttgccacacagtggggactttcgacagcgcttgggatcaccctttggttaacggctgggggtctcttcagtagtctaactccctttatgttacacagtggttggtcccctncgcgtacatagacctgtccggcctgtgtcttacctctcccggggtcccagtcccatccgtgtgaagaggtcccccccctgaatattcccccattacatgagcgagcactcgctgaaggcaggtgccgacatcacgccgcgcgaaggtgatgagcttgcccggctgccctacctacggacctggttccgcacccgcagcgccatcatcctgcacctcagcaacggcagcgtcagatccacttcttcccggatcccccccagctcatcttgggccccctgatggcaacccgtgacctacatcgacgagaatcgggaattccgcacattccgcctgagttctcctggaggagtacggctgctgcaaggagctggccaaccggctccgctacgcccgcactatggtggaacacagctgctgagctcacgctcggccagcaaccgtttcaaggcctcctaatagctgccctcccctccggagctggtgccctcctcactcccacctgcatctggggcccatactggttggctcccgcggtgccatgtctgcasgtgtgccccccasgccccggtggctgggsrcagagsctgcatcastccttgcacggtgggggttgctggaatagtgataaatgtacattttaaaatctcaatatactttttagaaaaggagcccctcaaccccaccatatgaattgtacagaatatttctattgaattcggaactgtcctttccttggctttatgcacattaaacagatgtgaatatta

SEQ ID NO: 33 - DNA, 1562 bp, Homo sapien
agtcacaccattgcactccggcctgggcgacagtgagactccatctcaaaaaggaaaaaaaaaaaaaagaaagaccacatggacccaacatcaaatagagctcatctccctggaagctttgccacatctgtactcacagttcatgtcacttgtgacttctgtttttcaggtttgggcaaaactacccctgatccttcagctaacattagtctggatggtgtagacgttcctcttgggaccgggatttcatctggtgtgaatgacacctctctactatataacgagtatcctttcttgagtatgctgtgtgagcacaaagggatgttctcgagctacagagtcacttatgtgctgtcagattacctggggcagacaaggattagaggctgtcctgtagtgtgtcccatggtgactgtttcccttctgtggtccctccctgtgcatagcctggcttacagggtatgagccttcccccagtttccagaggatgatctcctctcctcagtctgcctgaagaagacttagagtaactttcaggctggcattgagcatcctgccagccccggggagatgaggcaacccagccccatgaagaggccttagagtgactttcaggctggcactgagcgtcctgccagcctgggggagatgaggcacatgtacataccctctgttgtatggctgttggctccttaacaagcttcccctcaggtacattgtctatgatattgctcaggtaaatctgaagtatctgctgaaactgaaattcaattttaagacctccctgtggtaattgggagaggtagccgagtcacacccggtggctctggtatgaattcacccgaagcgcttctgcaccaactcacctggccgctaagttgctgatgggtagtacctgtactaaaccacctcagaaaggattttacagaaacgtgttaaaggttttctctaacttctcaagtcccttgttttgtgttgtgtctgtggggaggggttgttttggggttgtttttgttttttcttgccaggtagataaaactgacatagagaaaaggctggagagagattctgttgcatagactagtcctatggaaaaaaccaagcttcgttagaatgtctgccttactggtttccccagggaaggaaaaatacacttccacccttttttctaagtgttcgtctttagttttgattttggaaagatgttaagcatttatttttagttaaaaataaaaactaatttcatactatttagattttcttttttatcttgcacttattgtcccctttttagttttttttgtttgcctcttgtggtgaggggtgtgggaagaccaaaggaaggaacgctaacaatttctcatacttagaaacaaaaagagctttccttctccaggaatactgaacatgggagctcttgaaatatgtagtattaaaagttgcatttgaaattcttgactttcttatgggcacttttgtcttccaaattaaaactctaccacaaatatacttacccaagggctaatagtaatactcgattaaaaatgcagatgccttctcta

SEQ ID NO: 34 - DNA, 1135 bp, Homo sapien
agtcacaccattgcactccggcctgggcgacagtgagactccatctcaaaaaggaaaaaaaaaaaaaagaaagaccacatggacccaacatcaaatagagctcatctccctggaagctttgccacatctgtactcacagttcatgtcacttgtgacttctgtttttcaggtttgggcaaaactacccctgatccttcagctaacattagtctggatggtgtagacgttcctcttgggaccgggatttcatctggtgtgaatgacacctctctactatataacgagtacattgtctatgatattgctcaggtaaatctgaagtatctgctgaaactgaaattcaattttaagacctccctgtggtaattgggagaggtagccgagtcacacccggtggctctggtatgaattcacccgaagcgcttctgcaccaactcacctggccgctaagttgctgatgggtagtacctgtactaaaccacctcagaaaggattttacagaaacgtgttaaaggttttctctaacttctcaagtcccttgttttgtgttgtgtctgtggggaggggttgttttggggttgtttttgttttttcttgccaggtagataaaactgacatagagaaaaggctggagagagattctgttgcatagactagtcctatggaaaaaaccaagcttcgttagaatgtctgccttactggtttccccagggaaggaaaaatacacttccacccttttttctaagtgttcgtctttagttttgattttggaaagatgttaagcatttatttttagttaaaaataaaaactaatttcatactatttagattttcttttttatcttgcacttattgtcccctttttagttttttttgtttgcctcttgtggtgaggggtgtgggaagaccaaaggaaggaacgctaacaatttctcatacttagaaacaaaaagagctttccttctccaggaatactgaacatgggagctcttgaaatatgtagtattaaaagttgcatttgaaattcttgactttcttatgggcacttttgtcttccaaattaaaactctaccacaaatatacttacccaagggctaatagtaatactcgattaaaaatgcagatgccttctcta

SEQ ID NO: 35 - DNA, 1852 bp, Homo sapien
  misc_feature (204)..(204): n=a, c, g or t
actatgatctttgatgtggaacgcgtgaccaatgccgattggtgaactttgacatcgatcttctacaagatgcactcttggtcatgattagtgcttggcttatcacgcgacactaaataatcgactcgcgtcgagtagccgtcccgtacgtgcaagcagatactccaaggatcggacgattcgtagatcgttcagtatcctggnatctaactcaaaatcgacgttctctaacagccacgtgatctcaccctcacagattatcgcgcgccgaaccgagaagcctccgctcctgaacaatgcagacaggtgtgcagggccaaggtggaaatgcttgacaacctgctggacatcgaggtggcctacagtctgctcaggggagggtctgatgatagcagcaaggatcccatcgatgtcaactatgagaagctcaaaactgacattaaggtggttgacagagattctgaagaagccgagatcatcaggaagtatgttaagaacactcatgcaaccacacacaatgcgtatgacttggaagtcatcgatatctttaagatagagcgtgaaggcgaatgccagcgttacaagccctttaagcagcttcataaccgaagattgctgtggcacgggtccaggaccaccaactttgctgggatcctgtcccagggtcttcggatagccccgcctgaagcgcccgtgacaggctacatgtttggtaaagggatctatttcgctgacatggtctccaagagtgccaactactgccatacgtctcagggagacccaataggcttaatcctgttgggagaagttgcccttggaaacatgtatgaactgaagcacgcttcacatatcagcaagttacccaagggcaagcacagtgtcaaaggtttgggcaaaactacccctgatccttcagctaacattagtctggatggtgtagacgttcctcttgggaccgggatttcatctggtgtgaatgacacctctctactatataacgagtacattgtctatgatattgctcaggtaaatctgaagtatctgctgaaactgaaattcaattttaagacctccctgtggtaattgggagaggtagccgagtcacacccggtggctctggtatgaattcacccgaagcgcttctgcaccaactcacctggccgctaagttgctgatgggtagtacctgtactaaaccacctcagaaaggattttacagaaacgtgttaaaggttttctctaacttctcaagtcccttgttttgtgttgtgtctgtggggaggggttgttttggggttgtttttgttttttcttgccaggtagataaaactgacatagagaaaaggctggagagagattctgttgcatagactagtcctatggaaaaaaccaagcttcgttagaatgtctgccttactggtttccccagggaaggaaaaatacacttccacccttttttctaagtgttcgtctttagttttgattttggaaagatgttaagcatttatttttagttaaaaataaaaactaatttcatactatttagattttcttttttatcttgcacttattgtcccctttttagttttttttgtttgcctcttgtggtgaggggtgtgggaagaccaaaggaaggaacgctaacaatttctcatacttagaaacaaaaagagctttccttctccaggaatactgaacatgggagctcttgaaatatgtagtattaaaagttgcatttgaaattcttgactttcttatgggcacttttgtcttccaaattaaaactctaccacaaatatacttacccaagggctaatagtaatactcgattaaaaatgcagatgccttctcta

SEQ ID NO: 36 - DNA, 4412 bp, Homo sapien
aggcatcagcaatctatcagggaacggcggtggccggtgcggcgtgttcggtggcggctctggccgctcaggcgcctgcggctgggtgagcgcacgcgaggcggcgaggcggcagcgtgtttctaggtcgtggcgtcgggcttccggagctttggcggcagctaggggaggatggcggagtcttcggataagctctatcgagtcgagtacgccaagagcgggcgcgcctcttgcaagaaatgcagcgagagcatccccaaggactcgctccggatggccatcatggtgcagtcgcccatgtttgatggaaaagtcccacactggtaccacttctcctgcttctggaaggtgggccactccatccggcaccctgacgttgaggtggatgggttctctgagcttcggtgggatgaccagcagaaagtcaagaagacagcggaagctggaggagtgacaggcaaaggccaggatggaattggtagcaaggcagagaagactctgggtgactttgcagcagagtatgccaagtccaacagaagtacgtgcaaggggtgtatggagaagatagaaaagggccaggtgcgcctgtccaagaagatggtggacccggagaagccacagctaggcatgattgaccgctggtaccatccaggctgctttgtcaagaacagggaggagctgggtttccggcccgagtacagtgcgagtcagctcaagggcttcagcctccttgctacagaggataaagaagccctgaagaagcagctcccaggagtcaagagtgaaggaaagagaaaaggcgatgaggtggatggagtggatgaagtggcgaagaagaaatctaaaaaagaaaaagacaaggatagtaagcttgaaaaagccctaaaggctcagaacgacctgatctggaacatcaaggacgagctaaagaaagtgtgttcaactaatgacctgaaggagctactcatcttcaacaagcagcaagtgccttctggggagtcggcgatcttggaccgagtagctgatggcatggtgttcggtgccctccttccctgcgaggaatgctcgggtcagctggtcttcaagagcgatgcctattactgcactggggacgtcactgcctggaccaagtgtatggtcaagacacagacacccaaccggaaggagtgggtaaccccaaaggaattccgagaaatctcttacctcaagaaattgaaggttaaaaagcaggaccgtatattccccccagaaaccagcgcctccgtggcggccacgcctccgccctccacagcctcggctcctgctgctgtgaactcctctgcttcagcagataagccattatccaacatgaagatcctgactctcgggaagctgtcccggaacaaggatgaagtgaaggccatgattgagaaactcggggggaagttgacggggacggccaacaaggcttccctgtgcatcagcaccaaaaaggaggtggaaaagatgaataagaagatggaggaagtaaaggaagccaacatccgagttgtgtctgaggacttcctccaggacgtctccgcctccaccaagagccttcaggagttgttcttagcgcacatcttgtccccttggggggcagaggtgaaggcagagcctgttgaagttgtggccccaagagggaagtcaggggctgcgctctccaaaaaaagcaagggccaggtcaaggaggaaggtatcaacaaatctgaaaagagaatgaaattaactcttaaaggaggagcagctgtggatcctgattctggactggaacactctgcgcatgtcctggagaaaggtgggaaggtcttcagtgccacccttggcctggtggacatcgttaaaggaaccaactcctactacaagctgcagcttctggaggacgacaaggaaaacaggtattggatattcaggtcctggggccgtgtgggtacggtgatcggtagcaacaaactggaacagatgccgtccaaggaggatgccattgagcacttcatgaaattatatgaagaaaaaaccgggaacgcttggcactccaaaaatttcacgaagtatcccaaaaagttctaccccctggagattgactatggccaggatgaagaggcagtgaagaagctgacagtaaatcctggcaccaagtccaagctccccaagccagttcaggacctcatcaagatgatctttgatgtggaaagtatgaagaaagccatggtggagtatgagatcgaccttcagaagatgcccttggggaagctgagcaaaaggcagatccaggccgcatactccatcctcagtgaggtccagcaggcggtgtctcagggcagcagcgactctcagatcctggatctctcaaatcgcttttacaccctgatcccccacgactttgggatgaagaagcctccgctcctgaacaatgcagacagtgtgcaggccaaggtggaaatgcttgacaacctgctggacatcgaggtggcctacagtctgctcaggggagggtctgatgatagcagcaaggatcccatcgatgtcaactatgagaagctcaaaactgacattaaggtggttgacagagattctgaagaagccgagatcatcaggaagtatgttaagaacactcatgcaaccacacacaatgcgtatgacttggaagtcatcgatatctttaagatagagcgtgaaggcgaatgccagcgttacaagccctttaagcagcttcataaccgaagattgctgtggcacgggtccaggaccaccaactttgctgggatcctgtcccagggtcttcggatagccccgcctgaagcgcccgtgacaggctacatgtttggtaaagggatctatttcgctgacatggtctccaagagtgccaactactgccatacgtctcagggagacccaataggcttaatcctgttgggagaagttgcccttggaaacatgtatgaactgaagcacgcttcacatatcagcaagttacccaagggcaagcacagtgtcaaaggtttgggcaaaactacccctgatccttcagctaacattagtctggatggtgtagacgttcctcttgggaccgggatttcatctggtgtgaatgacacctctctactatataacgagtatcctttcttgagtatgctgtgtgagcacaaagggatgttctcgagctacagagtcacttatgtgctgtcagattacctggggcagacaaggattagaggctgtcctgtagtgtgtcccatggtgactgtttcccttctgtggtccctccctgtgcatagcctggcttacagggtatgagccttcccccagtttccagaggatgatctcctctcctcagtctgcctgaagaagacttagagtaactttcaggctggcattgagcatcctgccagccccggggagatgaggcaacccagccccatgaagaggccttagagtgactttcaggctggcactgagcgtcctgccagcctgggggagatgaggcacatgtacataccctctgttgtatggctgttggctccttaacaagcttcccctcaggtacattgtctatgatattgctcaggtaaatctgaagtatctgctgaaactgaaattcaattttaagacctccctgtggtaattgggagaggtagccgagtcacacccggtggctctggtatgaattcacccgaagcgcttctgcaccaactcacctggccgctaagttgctgatgggtagtacctgtactaaaccacctcagaaaggattttacagaaacgtgttaaaggttttctctaacttctcaagtcccttgttttgtgttgtgtctgtggggaggggttgttttggggttgtttttgttttttcttgccaggtagataaaactgacatagagaaaaggctggagagagattctgttgcatagactagtcctatggaaaaaaccaagcttcgttagaatgtctgccttactggtttccccagggaaggaaaaatacacttccacccttttttctaagtgttcgtctttagttttgattttggaaagatgttaagcatttatttttagttaaaaataaaaactaatttcatactatttagattttcttttttatcttgcacttattgtcccctttttagttttttttgtttgcctcttgtggtgaggggtgtgggaagaccaaaggaaggaacgctaacaatttctcatacttagaaacaaaaagagctttccttctccaggaatactgaacatgggagctcttgaaatatgtagtattaaaagttgcatttgaaattcttgactttcttatgggcacttttgtcttccaaattaaaactctaccacaaatatacttacccaagggctaatagtaatactcgattaaaaatgcagatgccttctcta

SEQ ID NO: 37 - DNA, 2338 bp, Homo sapien
gacgtgcgcgctcaaaggttgcccgtctctgacgcccgcatttcctggtctggagccggctgagccacagcagggtcgccgcggggtcccggggccgtgctcccctgcccctcccgggagcgcgcggggcggggcggggcggggcgggaccaggcgggcgagctgggccctcgcccctccctcgggcggtcacctgggcacgggcgctgcaggtgtcggggcctcaaccttgcggagccgacagccatcgatcctcgggtggcctcgaggtggtggcagggccgccccctgcagtccggagacgaacgcacggaccgggcctccggaggcaggttcggctggaaggaaccgctctcgcttcgtcctacacttgcgcaaatgtctccgagcttactcacatagcatattggtatatcaaaatgaaatgcaaggaaccaaaaataacataattgaaggcagtaaaagtgaaattaaataggaagatcatcagtcaaggaagacccactggagactgaaaccacctgttttcagagcttcaggaaaagacttaatctgaaggatcctgcagctaaaaagctttgaaaactgtgttaaggggccccataagcatcgcttctaaacttcactgacaaaagggactggggtcatgctgtctggagtcagagtgagggacagaaaatgaagcagtgttttatcatgtgtatttcagcaggtcttcttgaaatttaactaaaaatatgactgctctctcttcagagaactgctcttttcagtaccagttacgtcaaacaaaccagcccctagatgttaactatctgctattcttgatcatacttgggaaaatattattaaatatccttacactaggaatgagaagaaaaaacacctgtcaaaattttatggaatatttttgcatttcactagcattcgttgatcttttacttttggtaaacatttccattatattgtatttcagggattttgtacttttaagcattaggttcactaaataccacatctgcctatttactcaaattatttcctttacttatggctttttgcattatccagttttcctgacagcttgtatagattattgcctgaatttctctaaaacaaccaagctttcatttaagtgtcaaaaattattttatttctttacagtaattttaatttggatttcagtccttgcttatgttttgggagacccagccatctaccaaagcctgaaggcacagaatgcttattctcgtcactgtcctttctatgtcagcattcagagttactggctgtcatttttcatggtgatgattttatttgtagctttcataacctgttgggaagaagttactactttggtacaggctatcaggataacttcctatatgaatgaaactatcttatattttcctttttcatcccactccagttatactgtgagatctaaaaaaatattcttatccaagctcattgtctgttttctcagtacctggttaccatttgtactacttcaggtaatcattgttttacttaaagttcagattccagcatatattgagatgaatattccctggttatactttgtcaatagttttctcattgctacagtgtattggtttaattgtcacaagcttaatttaaaagacattggattacctttggatccatttgtcaactggaagtgctgcttcattccacttacaattcctaatcttgagcaaattgaaaagcctatatcaataatgatttgttaatattattaattaaaagttacagctgtcataagatcataattttatgaacagaaagaactcaggacatattaaaaaataaactgaactaaaacaacttttgccccctgactgatagcatttcagaatgtgtcttttgaagggctatgataccagttattaaatagtgttttattttaaaaacaaaataattccaagaagtttttatagttattcagggacactatattacaaatattactttgttattaacacaaaaagtgataagagttaacatttggctatactgatgtttgtgttactcaaaaaaactactggatgcaaactgttatgtaaatctgagatttcactgacaactttaagatatcaacctaaacatttttattaaatgttcaaatgaaagcaagaaagtaaaaattggttcttaaaatgatttggcataaagttcaatgtaagaggargargaagattacctcattttaaatgtagctaattaattttaaaaagtatawctctgkttttaatgcmaatattcctggaagaarrgggtttkggtkgcycaccttatggaactgggascrktgaca

SEQ ID NO: 38 - DNA, 2180 bp, Homo sapien
gacgtgcgcgctcaaaggttgcccgtctctgacgcccgcatttcctggtctggagccggctgagccacagcagggtcgccgcggggtcccggggccgtgctcccctgcccctcccgggagcgcgcggggcggggcggggcggggcgggaccaggcgggcgagctgggccctcgcccctccctcgggcggtcacctgggcacgggcgctgcaggtgtcggggcctcaaccttgcggagccgacagccatcgatcctcgggtggcctcgaggtggtggcagggccgccccctgcagtccggagacgaacgcacggaccgggcctccggaggcaggttcggctggaaggaaccgctctcgcttcgtcctacacttgcgcaaatgtctccgagcttactcacatagcatattggtatatcaaaatgaaatgcaaggaaccaaaaataacataattgaaggcagtaaaagtgaaattaaataggaagatcatcagtcaaggaagacccactggagaggacagaaaatgaagcagtgttttatcatgtgtatttcagcaggtcttcttgaaatttaactaaaaatatgactgctctctcttcagagaactgctcttttcagtaccagttacgtcaaacaaaccagcccctagatgttaactatctgctattcttgatcatacttgggaaaatattattaaatatccttacactaggaatgagaagaaaaaacacctgtcaaaattttatggaatatttttgcatttcactagcattcgttgatcttttacttttggtaaacatttccattatattgtatttcagggattttgtacttttaagcattaggttcactaaataccacatctgcctatttactcaaattatttcctttacttatggctttttgcattatccagttttcctgacagcttgtatagattattgcctgaatttctctaaaacaaccaagctttcatttaagtgtcaaaaattattttatttctttacagtaattttaatttggatttcagtccttgcttatgttttgggagacccagccatctaccaaagcctgaaggcacagaatgcttattctcgtcactgtcctttctatgtcagcattcagagttactggctgtcatttttcatggtgatgattttatttgtagctttcataacctgttgggaagaagttactactttggtacaggctatcaggataacttcctatatgaatgaaactatcttatattttcctttttcatcccactccagttatactgtgagatctaaaaaaatattcttatccaagctcattgtctgttttctcagtacctggttaccatttgtactacttcaggtaatcattgttttacttaaagttcagattccagcatatattgagatgaatattccctggttatactttgtcaatagttttctcattgctacagtgtattggtttaattgtcacaagcttaatttaaaagacattggattacctttggatccatttgtcaactggaagtgctgcttcattccacttacaattcctaatcttgagcaaattgaaaagcctatatcaataatgatttgttaatattattaattaaaagttacagctgtcataagatcataattttatgaacagaaagaactcaggacatattaaaaaataaactgaactaaaacaacttttgccccctgactgatagcatttcagaatgtgtcttttgaagggctatgataccagttattaaatagtgttttattttaaaaacaaaataattccaagaagtttttatagttattcagggacactatattacaaatattactttgttattaacacaaaaagtgataagagttaacatttggctatactgatgtttgtgttactcaaaaaaactactggatgcaaactgttatgtaaatctgagatttcactgacaactttaagatatcaacctaaacatttttattaaatgttcaaatgaaagcaagaaagtaaaaattggttcttaaaatgatttggcataaagttcaatgtaagaggargargaagattacctcattttaaatgtagctaattaattttaaaaagtatawctctgkttttaatgcmaatattcctggaagaarrgggtttkggtkgcycaccttatggaactgggascrktgaca

SEQ ID NO: 39 - DNA, 4709 bp, Homo sapien
cccggggcggggcctccggggaccgcggggccgttggtttcgggacggaacgttcacgcggctggggcgggcgcgcgggggaagggtttgcggcggcgccgctgccggctaacgcggaggggcgcctggaggcggcgtggcgtccgctctggctccgactccggctctcgctctcgcttctagcccgcgtgcctgcgcagtcccctccccgagaaccatccccttgccccgcccagcgtcaggggtgcgcggccgccgagagaccccggaggcgtagccggctgcggaggcgaagaggtggcagcgcgagctgggaccagcgtctcggaggcgccgcagaattcacagatggattcagtggaaaagacaacaaatagaagtgaacaaaaatccagaaagtttttaaaaagcctcatccggaaacagccccaggaactgctcctggttatcgggactggcgtcagcgcagcagtggcccccggaatccctgccctttgctcgtggagaagctgcatcgaggccgtcatcgaggctgcagagcagctggaggtgctgcaccccggagacgtcgccgagttccggaggaaagtgacaaaggaccgggacctgttggttgtcgcccatgatctgatccggaagatgtcacctcgcacaggcgatgccaagcccagcttcttccaggactgcctgatggaggtgtttgacgacctggagcagcacatccggagtcctgtggtgctgcagtcgatcctcagcctgatggacaggggcgccatggtcctgaccaccaactatgacaacctgctggaggcctttggccggcggcagaacaagcccatggagtccctggacttgaaggacaagaccaaggtatgggctgggggtgcgggaggcctttggccggcggcagaacaagcccatggagtccctggacttgaaggacaagaccaaggtatgggctgggggtgcgggaggtctttggccggcggcagaacaagcccatggagtccctggacttgaaggacaagaccaaggtatgggctgggggtgcgggaggtctttggccggcggcagaacaagcccatggagtccctggacttgaaggacaagaccaaggtgtgggctgggggtgcgggaggtctttggccggcggcagaacaagcccatggagtccctggacttgaaggacaagaccaaggtgtgggctggggctgcgggcagcctgcaggtgtggggagttctgtgccctgggagctgctctcactttgtagcagtgaattactaataaagtagccaggcatggtggcgcctgcctgcagtccccgctactggggaggccgaggtgggaggattgcttgagcccaggagttccagactgaaatgagctgtgatcaggccacttattccagtctggacgtcggaggaagaccctgtctctaaaaataaaaaatacagtaactttgaagtttacagctgtgcacacatgtatagctggacacatttattcctgtttcaggtttccttaaccaagaaggaaaactaccaggctagctttatcagttgtgatacttaacacttgaaagacgcagatatctcatatctgtgtcctattactgcagttgaaaagttacaacttcacaagcacaaaatgatttcatgaacactttacttcttttttcacgtaatgtattttccctgttctgaatgcaacacctcttttaagtagtgctccttggcacttttgagaaattgctcatctatcaggaatgaccagggtaagtgagaaattcttaaacttggtcatcttgatataagggaattaatagctgcgagtttggcatcataaaacattgatgatggcaagcttggaaaggcctgtgctggctcgtttaattgtaacaggaaacccaggcacactcaccacacactagaacgaggttagccacagaggcaggtatatgtgaccagctgtgaacttggagaccagagaatgcacagataatccaatcgctaaagtttttgttgtttttttaaccactatcatttcttttcagaattgctaataattagcaaaatggaccaatgtaagttccatttccataaataaaagtatgattagggcaacagcttcttattaagggcagaagaaaagagctcctgcttgccatgtgtcaccctctgctcggagttccatattctcacctgacttggtttttcatggcagcatgcagtgctagtaagtagatgatttcatagacgagatgagctgagctggcacaggcacataacgtgcccagacattttgaagctgggattgggatcctggcctgactgcagagcaaaatacaccatttggtgcatcctggcaccggcccacatgtgtggctctgcagagaggcagcgggcttttctcatctctgcccccgtccgccgcttctcattccacccccacactccctggaagaacaggacccagagtaaccctgcatgtgctcgggctcctagagtggggctgagcagctttctgtcccactgagcctccctttccaggttggggcaggcaagtggattcgacaggctgccagaagactgcaaggtcattgggagttttaatctgtgactgtgtcatgaaggacatttgtactcgaattcatggagtgccactcctgatgggagaggaggcccatgacagtgacagtcatgctagtgatcgcggacaccacaccatgctgcctttgccagctggctccttcagcgagtcctcgcgccaagcctgggaggtagaggtgagggcagcgagcagcgcaggagtccgcagcccgcgcgggctgacctgcccagaagcctgttcccagtccctgccgttcccagtcactgcctcagggtggccgaggaggatgagctcttggtgtctcggctccactgactgcttttctttctccttcagatgctgatcgcgtggacagcaccacattattggtgccaggactgtgcaaagaggaagttagaagagaatggaattgaagtttcaaaaaaacgcacacaatcagatactggtaatgcatgccaggactgtgcaaagaggaagttagaagagaatggaattgaagtttcaaaaaaacgcacacaatcagatactgatgatgctggagggtcttgaaatctttacagtaaaacctgcaacttgaaaactagccttctgtaaccacagtgcccaaacgaagaggaatgtatggagaactccacgtggatctctgattgcgaaaccgtcacatacaccaagagagccacatgggcatgtggccctcaaggctgggtgagagggctcccctgtgtgttgaactatgcaggagggtgacgcggacacatttcaggtggactttgcaaggactgatggatagctacctcagggaccagaatccgtgggaagggatggacctggtgttcccgttcccatctgacaggctctcttttgtcaaggtggtatttttcgtaataaaaggggaagagtaaagactgtccaagcaacagtagctgccaaagagaaaatacgaaatagacactttttttttttgagtcagagtctcactctgtcacccaggacagagtgcagtggtacgatctcaagctcactgcagccaccaccgcctgggctcaagtgattctcctgcctcagcctcccgagtagctgggattacaggcgtccaccaccatgcccagctaatttttttatttttagtagagttggagtttcaccatgttggccaggatggtctcgaactcttgacctcaggtgatccacccgccttggcctcccaaagtgctaggattacaggcatgagccactgcgcccagcaaaataaacacattttataatttgtatgtggaaacatgttactatagaaagcattttaaaggtacgttttaaaggtccactgttaaatagtaaagaatgaatccgctagcgaaaatgtttttagggagaacagctggatcaaaagggcttctttggaattaggttgttttagtaacttctgttccaaagaaacacaggtctgatattgctaagaactgaaatcggaggagccagaggcccttttcagtccaggccaacattgtgcacggccactgtgggactgacaaccgggatagctcaagttcgaaagaccaggtttcaaacattataagttccaggctttgcaagtctttattctctggggtaatatccagtctttctgttattgtctcttaaaattctcttccatggcccacattaagggagtttgcagagagtgagggaggcaaaacttgaaaagggcctgcaacactttaaaccttctcaggttcacccacatgaaacagctgtgctgagtgtgctgccggtgcccggggagcttctctgactgtgacccggcagaggcttctgtggcggtgcatgagcggccctacagtggagggttctctttggaaacaaacagccctgcttggtttcagtttgaggccacttatcttcaatgtgacatttcttgccaagccctgtgacactccccattgatgactcccataggtacagataaagttaagaacaggaaacagaagggtaggatgcatagggagggagagaagccctgaaaactttttttttctttttgaagcatggaaaacaaatcttttatgccactccagccataaataaaattttaacttca

SEQ ID NO: 40 - DNA, 4556 bp, Homo sapien
cccggggcggggcctccggggaccgcggggccgttggtttcgggacggaacgttcacgcggctggggcgggcgcgcgggggaagggtttgcggcggcgccgctgccggctaacgcggaggggcgcctggaggcggcgtggcgtccgctctggctccgactccggctctcgctctcgcttctagcccgcgtgcctgcgcagtcccctccccgagaaccatccccttgccccgcccagcgtcaggggtgcgcggccgccgagagaccccggaggcgtagccggctgcggaggcgaagaggtggcagcgcgagctgggaccagcgtctcggaggcgccgcagaattcacagatggattcagtggaaaagacaacaaatagaagtgaacaaaaatccagaaagtttttaaaaagcctcatccggaaacagccccaggaactgctcctggttatcgggactggcgtcagcgcagcagtggcccccggaatccctgccctttgctcgtggagaagctgcatcgaggccgtcatcgaggctgcagagcagctggaggtgctgcaccccggagacgtcgccgagttccggaggaaagtgacaaaggaccgggacctgttggttgtcgcccatgatctgatccggaagatgtcacctcgcacaggcgatgccaagcccagcttcttccaggactgcctgatggaggtgtttgacgacctggagcagcacatccggagtcctgtggtgctgcagtcgatcctcagcctgatggacaggggcgccatggtcctgaccaccaactatgacaacctgctggaggcctttggccggcggcagaacaagcccatggagtccctggacttgaaggacaagaccaaggtatgggctgggggtgcgggaggcctttggccggcggcagaacaagcccatggagtccctggacttgaaggacaagaccaaggtatgggctgggggtgcgggaggtctttggccggcggcagaacaagcccatggagtccctggacttgaaggacaagaccaaggtatgggctgggggtgcgggaggtctttggccggcggcagaacaagcccatggagtccctggacttgaaggacaagaccaaggtgtgggctgggggtgcgggaggtctttggccggcggcagaacaagcccatggagtccctggacttgaaggacaagaccaaggtgtgggctggggctgcgggcagcctgcaggtgtggggagttctgtgccctgggagctgctctcactttgtagcagtgaattactaataaagtagccaggcatggtggcgcctgcctgcagtccccgctactggggaggccgaggtgggaggattgcttgagcccaggagttccagactgaaatgagctgtgatcaggccacttattccagtctggacgtcggaggaagaccctgtctctaaaaataaaaaatacagtaactttgaagtttacagctgtgcacacatgtatagctggacacatttattcctgtttcaggtttccttaaccaagaaggaaaactaccaggctagctttatcagttgtgatacttaacacttgaaagacgcagatatctcatatctgtgtcctattactgcagttgaaaagttacaacttcacaagcacaaaatgatttcatgaacactttacttcttttttcacgtaatgtattttccctgttctgaatgcaacacctcttttaagtagtgctccttggcacttttgagaaattgctcatctatcaggaatgaccagggtaagtgagaaattcttaaacttggtcatcttgatataagggaattaatagctgcgagtttggcatcataaaacattgatgatggcaagcttggaaaggcctgtgctggctcgtttaattgtaacaggaaacccaggcacactcaccacacactagaacgaggttagccacagaggcaggtatatgtgaccagctgtgaacttggagaccagagaatgcacagataatccaatcgctaaagtttttgttgtttttttaaccactatcatttcttttcagaattgctaataattagcaaaatggaccaatgtaagttccatttccataaataaaagtatgattagggcaacagcttcttattaagggcagaagaaaagagctcctgcttgccatgtgtcaccctctgctcggagttccatattctcacctgacttggtttttcatggcagcatgcagtgctagtaagtagatgatttcatagacgagatgagctgagctggcacaggcacataacgtgcccagacattttgaagctgggattgggatcctggcctgactgcagagcaaaatacaccatttggtgcatcctggcaccggcccacatgtgtggctctgcagagaggcagcgggcttttctcatctctgcccccgtccgccgcttctcattccacccccacactccctggaagaacaggacccagagtaaccctgcatgtgctcgggctcctagagtggggctgagcagctttctgtcccactgagcctccctttccaggttggggcaggcaagtggattcgacaggctgccagaagactgcaaggtcattgggagttttaatctgtgactgtgtcatgaaggacatttgtactcgaattcatggagtgccactcctgatgggagaggaggcccatgacagtgacagtcatgctagtgatcgcggacaccacaccatgctgcctttgccagctggctccttcagcgagtcctcgcgccaagcctgggaggtagaggtgagggcagcgagcagcgcaggagtccgcagcccgcgcgggctgacctgcccagaagcctgttcccagtccctgccgttcccagtcactgcctcagggtggccgaggaggatgagctcttggtgtctcggctccactgactgcttttctttctccttcagatgctgatcgcgtggacagcaccacattattggtaaagcagatctttcttcttgccagcctgttttttgcctacacattccattgtcttctgtcactaactgtaaaatcataaacgtttgtttttcaccttaaataattagcttgtattaaaacagccccactgaagatgataaatagccatgccttagcatggtccctgccacaccaagagactaaaagccatccctttgacgaggaagcacagccgaatcacacgtgagccagctggcacctgagaataatttcttgccctagaaccaagagtgacgggacttggaacaggttctatttgtgtgataccatgtggtgccagatgcagtgccttagaatgacccagctcttccgaaatgttcgttgcacgggtctgagcttgcacacagaagcttcctatttaatacttgttttgaaatgtgaacgctcttcttgctgggctcaattctgcctgtttataaatttaacaagactcggtggccatgagcgtcctcctgtgtgtgcgctgggcaccaggtgcctccccttgccgaatcatttgggtaaaagggactctggtgagtggcgcggaggcctctgtgcgcagccctgttttccctggctgtttggcccagcgcgttcacagatgggaaaacgcgcatcgatgtgggagctgctcgcctcacatccatgttagtggtgcaggaagtatgaaaccgccgcagtcggctccccgttgccacctattcccatgcgaaaggacatcttcattacacttgctttctcactgaaatgcgactcctggaagcatggctctctttggagagaagccgtagcgtggttgatgtcatctctagtggatggcagggtctgcttggccagtgcttcagtaaggtcacattatgaactgtgccttggcgagtggattctgaataaacaagcttcttaataaattcttctcttttaggtaatgcatgccaggactgtgcaaagaggaagttagaagagaatggaattgaagtttcaaaaaaacgcacacaatcagatactgatgatgctggagggtcttgaaatctttacagtaaaacctgcaacttgaaaactagccttctgtaaccacagtgcccaaacgaagaggaatgtatggagaactccacgtggatctctgattgcgaaaccgtcacatacaccaagagagccacatgggcatgtggccctcaaggctgggtgagagggctcccctgtgtgttgaactatgcaggagggtgacgcggacacatttcaggtggactttgcaaggactgatggatagctacctcagggaccagaatccgtgggaagggatggacctggtgttcccgttcccatctgacaggctctcttttgtcaaggtggtatttttcgtaataaaaggggaagagtaaagactgtccaagcaacagtagctgccaaagagaaaatacgaaatagacacttttttttttttgaggcaggagaatcgcttgaacccaggaggtggaggttgcagtgagcagagatcgcgccaccgcactgcagcctgggcaacagaacgagactacgtgtcaaaaaaagaaaaag

SEQ ID NO: 41 - DNA, 4637 bp, Homo sapien
gcccacccacgcacaatctcagtcctcgcaatacccacaagagaaattctcagcctcggggaagagtatttcttgatgagggaagagcgcggggaagacactcacgcacgcacaaacatgtgggcggccatggtgtgcccagcgccgtgctggcttctgggaacccccagtggacaagacggacaagcccgcgtgcctgcgcagtcccctccccgagaaccatccccttgccccgcccagcgtcaggggtgcgcggccgccgagagaccccggaggcgtagccggctgcggaggcgaagaggtggcagcgcgagctgggaccagcgtctcggaggcgccgcagaattcacagatggattcagtggaaaagacaacaaatagaagtgaacaaaaatccagaaagtttttaaaaagcctcatccggaaacagccccaggaactgctcctggttatcgggactggcgtcagcgcagcagtggcccccggaatccctgccctttgctcgtggagaagctgcatcgaggccgtcatcgaggctgcagagcagctggaggtgctgcaccccggagacgtcgccgagttccggaggaaagtgacaaaggaccgggacctgttggttgtcgcccatgatctgatccggaagatgtcacctcgcacaggcgatgccaagcccagcttcttccaggactgcctgatggaggtgtttgacgacctggagcagcacatccggagtcctgtggtgctgcagtcgatcctcagcctgatggacaggggcgccatggtcctgaccaccaactatgacaacctgctggaggcctttggccggcggcagaacaagcccatggagtccctggacttgaaggacaagaccaaggtatgggctgggggtgcgggaggcctttggccggcggcagaacaagcccatggagtccctggacttgaaggacaagaccaaggtatgggctgggggtgcgggaggtctttggccggcggcagaacaagcccatggagtccctggacttgaaggacaagaccaaggtatgggctgggggtgcgggaggtctttggccggcggcagaacaagcccatggagtccctggacttgaaggacaagaccaaggtgtgggctgggggtgcgggaggtctttggccggcggcagaacaagcccatggagtccctggacttgaaggacaagaccaaggtgtgggctggggctgcgggcagcctgcaggtgtggggagttctgtgccctgggagctgctctcactttgtagcagtgaattactaataaagtagccaggcatggtggcgcctgcctgcagtccccgctactggggaggccgaggtgggaggattgcttgagcccaggagttccagactgaaatgagctgtgatcaggccacttattccagtctggacgtcggaggaagaccctgtctctaaaaataaaaaatacagtaactttgaagtttacagctgtgcacacatgtatagctggacacatttattcctgtttcaggtttccttaaccaagaaggaaaactaccaggctagctttatcagttgtgatacttaacacttgaaagacgcagatatctcatatctgtgtcctattactgcagttgaaaagttacaacttcacaagcacaaaatgatttcatgaacactttacttcttttttcacgtaatgtattttccctgttctgaatgcaacacctcttttaagtagtgctccttggcacttttgagaaattgctcatctatcaggaatgaccagggtaagtgagaaattcttaaacttggtcatcttgatataagggaattaatagctgcgagtttggcatcataaaacattgatgatggcaagcttggaaaggcctgtgctggctcgtttaattgtaacaggaaacccaggcacactcaccacacactagaacgaggttagccacagaggcaggtatatgtgaccagctgtgaacttggagaccagagaatgcacagataatccaatcgctaaagtttttgttgtttttttaaccactatcatttcttttcagaattgctaataattagcaaaatggaccaatgtaagttccatttccataaataaaagtatgattagggcaacagcttcttattaagggcagaagaaaagagctcctgcttgccatgtgtcaccctctgctcggagttccatattctcacctgacttggtttttcatggcagcatgcagtgctagtaagtagatgatttcatagacgagatgagctgagctggcacaggcacataacgtgcccagacattttgaagctgggattgggatcctggcctgactgcagagcaaaatacaccatttggtgcatcctggcaccggcccacatgtgtggctctgcagagaggcagcgggcttttctcatctctgcccccgtccgccgcttctcattccacccccacactccctggaagaacaggacccagagtaaccctgcatgtgctcgggctcctagagtggggctgagcagctttctgtcccactgagcctccctttccaggttggggcaggcaagtggattcgacaggctgccagaagactgcaaggtcattgggagttttaatctgtgactgtgtcatgaaggacatttgtactcgaattcatggagtgccactcctgatgggagaggaggcccatgacagtgacagtcatgctagtgatcgcggacaccacaccatgctgcctttgccagctggctccttcagcgagtcctcgcgccaagcctgggaggtagaggtgagggcagcgagcagcgcaggagtccgcagcccgcgcgggctgacctgcccagaagcctgttcccagtccctgccgttcccagtcactgcctcagggtggccgaggaggatgagctcttggtgtctcggctccactgactgcttttctttctccttcagatgctgatcgcgtggacagcaccacattattgggtaatgcatgccaggactgtgcaaagaggaagttagaagagaatggaattgaagtttcaaaaaaacgcacacaatcagatactgatgatgctggagggtcttgaaatctttacagtaaaacctgcaacttgaaaactagccttctgtaaccacagtgcccaaacgaagaggaatgtatggagaactccacgtggatctctgattgcgaaaccgtcacatacaccaagagagccacatgggcatgtggccctcaaggctgggtgagagggctcccctgtgtgttgaactatgcaggagggtgacgcggacacatttcaggtggactttgcaaggactgatggatagctacctcagggaccagaatccgtgggaagggatggacctggtgttcccgttcccatctgacaggctctcttttgtcaaggtggtatttttcgtaataaaaggggaagagtaaagactgtccaagcaacagtagctgccaaagagaaaatacgaaatagacactttttttttttgagtcagagtctcactctgtcacccaggacagagtgcagtggtacgatctcaagctcactgcagccaccaccgcctgggctcaagtgattctcctgcctcagcctcccgagtagctgggattacaggcgtccaccaccatgcccagctaatttttttatttttagtagagttggagtttcaccatgttggccaggatggtctcgaactcttgacctcaggtgatccacccgccttggcctcccaaagtgctaggattacaggcatgagccactgcgcccagcaaaataaacacattttataatttgtatgtggaaacatgttactatagaaagcattttaaaggtacgttttaaaggtccactgttaaatagtaaagaatgaatccgctagcgaaaatgtttttagggagaacagctggatcaaaagggcttctttggaattaggttgttttagtaacttctgttccaaagaaacacaggtctgatattgctaagaactgaaatcggaggagccagaggcccttttcagtccaggccaacattgtgcacggccactgtgggactgacaaccgggatagctcaagttcgaaagaccaggtttcaaacattataagttccaggctttgcaagtctttattctctggggtaatatccagtctttctgttattgtctcttaaaattctcttccatggcccacattaagggagtttgcagagagtgagggaggcaaaacttgaaaagggcctgcaacactttaaaccttctcaggttcacccacatgaaacagctgtgctgagtgtgctgccggtgcccggggagcttctctgactgtgacccggcagaggcttctgtggcggtgcatgagcggccctacagtggagggttctctttggaaacaaacagccctgcttggtttcagtttgaggccacttatcttcaatgtgacatttcttgccaagccctgtgacactccccattgatgactcccataggtacagataaagttaagaacaggaaacagaagggtaggatgcatagggagggagagaagccctgaaaactttttttttctttttgaagcatggaaaacaaatcttttatgccactccagccataaataaaattttaacttca

SEQ ID NO: 42 - DNA, 5471 bp, Homo sapien
cccggggcggggcctccggggaccgcggggccgttggtttcgggacggaacgttcacgcggctggggcgggcgcgcgggggaagggtttgcggcggcgccgctgccggctaacgcggaggggcgcctggaggcggcgtggcgtccgctctggctccgactccggctctcgctctcgcttctagcccgcgtgcctgcgcagtcccctccccgagaaccatccccttgccccgcccagcgtcaggggtgcgcggccgccgagagaccccggaggcgtagccggctgcggaggcgaagaggtggcagcgcgagctgggaccagcgtctcggaggcgccgcagaattcacagatggattcagtggaaaagacaacaaatagaagtgaacaaaaatccagaaagtttttaaaaagcctcatccggaaacagccccaggaactgctcctggttatcgggactggcgtcagcgcagcagtggcccccggaatccctgccctttgctcgtggagaagctgcatcgaggccgtcatcgaggctgcagagcagctggaggtgctgcaccccggagacgtcgccgagttccggaggaaagtgacaaaggaccgggacctgttggttgtcgcccatgatctgatccggaagatgtcacctcgcacaggcgatgccaagcccagcttcttccaggactgcctgatggaggtgtttgacgacctggagcagcacatccggagtcctgtggtgctgcagtcgatcctcagcctgatggacaggggcgccatggtcctgaccaccaactatgacaacctgctggaggcctttggccggcggcagaacaagcccatggagtccctggacttgaaggacaagaccaaggtatgggctgggggtgcgggaggcctttggccggcggcagaacaagcccatggagtccctggacttgaaggacaagaccaaggtatgggctgggggtgcgggaggtctttggccggcggcagaacaagcccatggagtccctggacttgaaggacaagaccaaggtatgggctgggggtgcgggaggtctttggccggcggcagaacaagcccatggagtccctggacttgaaggacaagaccaaggtgtgggctgggggtgcgggaggtctttggccggcggcagaacaagcccatggagtccctggacttgaaggacaagaccaaggtgtgggctggggctgcgggcagcctgcaggtgtggggagttctgtgccctgggagctgctctcactttgtagcagtgaattactaataaagtagccaggcatggtggcgcctgcctgcagtccccgctactggggaggccgaggtgggaggattgcttgagcccaggagttccagactgaaatgagctgtgatcaggccacttattccagtctggacgtcggaggaagaccctgtctctaaaaataaaaaatacagtaactttgaagtttacagctgtgcacacatgtatagctggacacatttattcctgtttcaggtttccttaaccaagaaggaaaactaccaggctagctttatcagttgtgatacttaacacttgaaagacgcagatatctcatatctgtgtcctattactgcagttgaaaagttacaacttcacaagcacaaaatgatttcatgaacactttacttcttttttcacgtaatgtattttccctgttctgaatgcaacacctcttttaagtagtgctccttggcacttttgagaaattgctcatctatcaggaatgaccagggtaagtgagaaattcttaaacttggtcatcttgatataagggaattaatagctgcgagtttggcatcataaaacattgatgatggcaagcttggaaaggcctgtgctggctcgtttaattgtaacaggaaacccaggcacactcaccacacactagaacgaggttagccacagaggcaggtatatgtgaccagctgtgaacttggagaccagagaatgcacagataatccaatcgctaaagtttttgttgtttttttaaccactatcatttcttttcagaattgctaataattagcaaaatggaccaatgtaagttccatttccataaataaaagtatgattagggcaacagcttcttattaagggcagaagaaaagagctcctgcttgccatgtgtcaccctctgctcggagttccatattctcacctgacttggtttttcatggcagcatgcagtgctagtaagtagatgatttcatagacgagatgagctgagctggcacaggcacataacgtgcccagacattttgaagctgggattgggatcctggcctgactgcagagcaaaatacaccatttggtgcatcctggcaccggcccacatgtgtggctctgcagagaggcagcgggcttttctcatctctgcccccgtccgccgcttctcattccacccccacactccctggaagaacaggacccagagtaaccctgcatgtgctcgggctcctagagtggggctgagcagctttctgtcccactgagcctccctttccaggttggggcaggcaagtggattcgacaggctgccagaagactgcaaggtcattgggagttttaatctgtgactgtgtcatgaaggacatttgtactcgaattcatggagtgccactcctgatgggagaggaggcccatgacagtgacagtcatgctagtgatcgcggacaccacaccatgctgcctttgccagctggctccttcagcgagtcctcgcgccaagcctgggaggtagaggtgagggcagcgagcagcgcaggagtccgcagcccgcgcgggctgacctgcccagaagcctgttcccagtccctgccgttcccagtcactgcctcagggtggccgaggaggatgagctcttggtgtctcggctccactgactgcttttctttctccttcagatgctgatcgcgtggacagcaccacattattgggtaatgcatgccaggactgtgcaaagaggaagttagaagagaatggaattgaagtttcaaaaaaacgcacacaatcagatactgatgatgctggagggtcttgaaatctttacagtaaaacctgcaacttgaaaactagccttctgtaaccacagtgcccaaacgaagaggaatgtatggagaactccacgtggatctctgattgcgaaaccgtcacatacaccaagagagccacatgggcatgtggccctcaaggctgggtgagagggctcccctgtgtgttgaactatgcaggagggtgacgcggacacatttcaggtggactttgcaaggactgatggatagctacctcagggaccagaatccgtgggaagggatggacctggtgttcccgttcccatctgacaggctctcttttgtcaaggtggtatttttcgtaataaaaggggaagagtaaagactgtccaagcaacagtagctgccaaagagaaaatacgaaatagacactttttttttttgagtcagagtctcactctgtcacccaggacagagtgcagtggtacgatctcaagctcactgcagccaccaccgcctgggctcaagtgattctcctgcctcagcctcccgagtagctgggattacaggcgtccaccaccatgcccagctaatttttttatttttagtagagttggagtttcaccatgttggccaggatggtctcgaactcttgacctcaggtgatccacccgccttggcctcccaaagtgctaggattacaggcatgagccactgcgcccagcaaaataaacacattttataatttgtatgtggaaacatgttactatagaaagcattttaaaggtacgttttaaaggtccactgttaaatagtaaagaatgaatccgctagcgaaaatgtttttagggagaacagctggatcaaaagggcttctttggaattaggttgttttagtaacttctgttccaaagaaacacaggtctgatattgctaagaactgaaatcggaggagccagaggcccttttcagtccaggccaacattgtgcacggccactgtgggactgacaaccgggatagctcaagttcgaaagaccaggtttcaaacattataagttccaggctttgcaagtctttattctctggggtaatatccagtctttctgttattgtctcttaaaattctcttccatggcccacattaagggagtttgcagagagtgagggaggcaaaacttgaaaagggcctgcaacactttaaaccttctcaggttcacccacatgaaacagctgtgctgagtgtgctgccggtgcccggggagcttctctgactgtgacccggcagaggcttctgtggcggtgcatgagcggccctacagtggagggttctctttggaaacaaacagccctgcttggtttcagtttgaggccacttatcttcaatgtgacatttcttgccaagccctgtgacactccccattgatgactcccataggtacagataaagttaagaacaggaaacagaagggtaggatgcatagggagggagagaagccctgaaaactttttttttctttttgaagcatggaaaacaaatcttttatgccactccagccataaataaaattttaacttcaaccctgtgtgctcagtgtttctttagttatgccaaggcttgctagaatgttatttagtgagaatttttagcttgagttgccacccaactgtgaaatcaactaaatgattacttgaatgtatttaaatgttttaaaaagcaaacattataaatttttctttaatgtcatttagtaagtgcagtcagggaatatctgaatctaagagctggccagacacagggtatagcagaattacaagcatagaggatgctatgcagtaggatgtaaagctcattacagcccatttttaagaaaagctttgtgtgctctgctggaggacacagccatgttgctgcaccacatggatgtatctagtcagttctgttgtatgctcgttgtagaatgtaaagtttattccaatccgattgatagattaaaggcaattccagcatagtgcacttgcttgtgtatagtttagtccgtgagaaacatcacatcaggaggtaacaaagttggccctgctgtttactgcctcaagctagagtagctattacattttaaaatggttatattttaagacagggcaggtagctcaaacctgtaatcccagcactttgggaggctgaggggggcggatcacttgaggccaggagtttgagaccagcctggccaacatggtgaaaccctgtctctactaaaaatacaaaaattagcctggcgtggtggcgtgtgcctgtaatcccagctacttgggagactgaggcaggagaatcacttgaaccaaggaggcagaggttgcagtgaaccaagattgcaccactgcactccagcctgggcgacagagggaattccatctaaa

SEQ ID NO: 43 - DNA, 4633 bp, Homo sapien
cccggggcggggcctccggggaccgcggggccgttggtttcgggacggaacgttcacgcggctggggcgggcgcgcgggggaagggtttgcggcggcgccgctgccggctaacgcggaggggcgcctggaggcggcgtggcgtccgctctggctccgactccggctctcgctctcgcttctagcccgcgtgcctgcgcagtcccctccccgagaaccatccccttgccccgcccagcgtcaggggtgcgcggccgccgagagaccccggaggcgtagccggctgcggaggcgaagaggtggcagcgcgagctgggaccagcgtctcggaggcgccgcagaattcacagatggattcagtggaaaagacaacaaatagaagtgaacaaaaatccagaaagtttttaaaaagcctcatccggaaacagccccaggaactgctcctggttatcgggactggcgtcagcgcagcagtggcccccggaatccctgccctttgctcgtggagaagctgcatcgaggccgtcatcgaggctgcagagcagctggaggtgctgcaccccggagacgtcgccgagttccggaggaaagtgacaaaggaccgggacctgttggttgtcgcccatgatctgatccggaagatgtcacctcgcacaggcgatgccaagcccagcttcttccaggactgcctgatggaggtgtttgacgacctggagcagcacatccggagtcctgtggtgctgcagtcgatcctcagcctgatggacaggggcgccatggtcctgaccaccaactatgacaacctgctggaggcctttggccggcggcagaacaagcccatggagtccctggacttgaaggacaagaccaaggtatgggctgggggtgcgggaggcctttggccggcggcagaacaagcccatggagtccctggacttgaaggacaagaccaaggtatgggctgggggtgcgggaggtctttggccggcggcagaacaagcccatggagtccctggacttgaaggacaagaccaaggtatgggctgggggtgcgggaggtctttggccggcggcagaacaagcccatggagtccctggacttgaaggacaagaccaaggtgtgggctgggggtgcgggaggtctttggccggcggcagaacaagcccatggagtccctggacttgaaggacaagaccaaggtgtgggctggggctgcgggcagcctgcaggtgtggggagttctgtgccctgggagctgctctcactttgtagcagtgaattactaataaagtagccaggcatggtggcgcctgcctgcagtccccgctactggggaggccgaggtgggaggattgcttgagcccaggagttccagactgaaatgagctgtgatcaggccacttattccagtctggacgtcggaggaagaccctgtctctaaaaataaaaaatacagtaactttgaagtttacagctgtgcacacatgtatagctggacacatttattcctgtttcaggtttccttaaccaagaaggaaaactaccaggctagctttatcagttgtgatacttaacacttgaaagacgcagatatctcatatctgtgtcctattactgcagttgaaaagttacaacttcacaagcacaaaatgatttcatgaacactttacttcttttttcacgtaatgtattttccctgttctgaatgcaacacctcttttaagtagtgctccttggcacttttgagaaattgctcatctatcaggaatgaccagggtaagtgagaaattcttaaacttggtcatcttgatataagggaattaatagctgcgagtttggcatcataaaacattgatgatggcaagcttggaaaggcctgtgctggctcgtttaattgtaacaggaaacccaggcacactcaccacacactagaacgaggttagccacagaggcaggtatatgtgaccagctgtgaacttggagaccagagaatgcacagataatccaatcgctaaagtttttgttgtttttttaaccactatcatttcttttcagaattgctaataattagcaaaatggaccaatgtaagttccatttccataaataaaagtatgattagggcaacagcttcttattaagggcagaagaaaagagctcctgcttgccatgtgtcaccctctgctcggagttccatattctcacctgacttggtttttcatggcagcatgcagtgctagtaagtagatgatttcatagacgagatgagctgagctggcacaggcacataacgtgcccagacattttgaagctgggattgggatcctggcctgactgcagagcaaaatacaccatttggtgcatcctggcaccggcccacatgtgtggctctgcagagaggcagcgggcttttctcatctctgcccccgtccgccgcttctcattccacccccacactccctggaagaacaggacccagagtaaccctgcatgtgctcgggctcctagagtggggctgagcagctttctgtcccactgagcctccctttccaggttggggcaggcaagtggattcgacaggctgccagaagactgcaaggtcattgggagttttaatctgtgactgtgtcatgaaggacatttgtactcgaattcatggagtgccactcctgatgggagaggaggcccatgacagtgacagtcatgctagtgatcgcggacaccacaccatgctgcctttgccagctggctccttcagcgagtcctcgcgccaagcctgggaggtagaggtgagggcagcgagcagcgcaggagtccgcagcccgcgcgggctgacctgcccagaagcctgttcccagtccctgccgttcccagtcactgcctcagggtggccgaggaggatgagctcttggtgtctcggctccactgactgcttttctttctccttcagatgctgatcgcgtggacagcaccacattattgggtaatgcatgccaggactgtgcaaagaggaagttagaagagaatggaattgaagtttcaaaaaaacgcacacaatcagatactgatgatgctggagggtcttgaaatctttacagtaaaacctgcaacttgaaaactagccttctgtaaccacagtgcccaaacgaagaggaatgtatggagaactccacgtggatctctgattgcgaaaccgtcacatacaccaagagagccacatgggcatgtggccctcaaggctgggtgagagggctcccctgtgtgttgaactatgcaggagggtgacgcggacacatttcaggtggactttgcaaggactgatggatagctacctcagggaccagaatccgtgggaagggatggacctggtgttcccgttcccatctgacaggctctcttttgtcaaggtggtatttttcgtaataaaaggggaagagtaaagactgtccaagcaacagtagctgccaaagagaaaatacgaaatagacactttttttttttgagtcagagtctcactctgtcacccaggacagagtgcagtggtacgatctcaagctcactgcagccaccaccgcctgggctcaagtgattctcctgcctcagcctcccgagtagctgggattacaggcgtccaccaccatgcccagctaatttttttatttttagtagagttggagtttcaccatgttggccaggatggtctcgaactcttgacctcaggtgatccacccgccttggcctcccaaagtgctaggattacaggcatgagccactgcgcccagcaaaataaacacattttataatttgtatgtggaaacatgttactatagaaagcattttaaaggtacgttttaaaggtccactgttaaatagtaaagaatgaatccgctagcgaaaatgtttttagggagaacagctggatcaaaagggcttctttggaattaggttgttttagtaacttctgttccaaagaaacacaggtctgatattgctaagaactgaaatcggaggagccagaggcccttttcagtccaggccaacattgtgcacggccactgtgggactgacaaccgggatagctcaagttcgaaagaccaggtttcaaacattataagttccaggctttgcaagtctttattctctggggtaatatccagtctttctgttattgtctcttaaaattctcttccatggcccacattaagggagtttgcagagagtgagggaggcaaaacttgaaaagggcctgcaacactttaaaccttctcaggttcacccacatgaaacagctgtgctgagtgtgctgccggtgcccggggagcttctctgactgtgacccggcagaggcttctgtggcggtgcatgagcggccctacagtggagggttctctttggaaacaaacagccctgcttggtttcagtttgaggccacttatcttcaatgtgacatttcttgccaagccctgtgacactccccattgatgactcccataggtacagataaagttaagaacaggaaacagaagggtaggatgcatagggagggagagaagccctgaaaactttttttttctttttgaagcatggaaaacaaatcttttatgccactccagccataaataaaattttaacttca

SEQ ID NO: 44 - DNA, 4941 bp, Homo sapien
gcccacccacgcacaatctcagtcctcgcaatacccacaagagaaattctcagcctcggggaagagtatttcttgatgagggaagagcgcggggaagacactcacgcacgcacaaacatgtgggcggccatggtgtgcccagcgccgtgctggcttctgggaacccccagtggacaagacggacaaggtaccggctctcaggggaagtgggagccagtcacaagcgtacctaatttcggagagtgacaagtactctgaaaaagaaagaaggtagggctggtgactggccaatttaagcgggcaggagtctgctgggggacggagaccagcctcaggtctgggttggggacagaagctgtgcctaagtgtggtgcaggatgcagttgcaaaggagcgcttccgatcgcacttgatgctcgccacgtccctgcaaagtgctcccgccccctttctgcaaatgaggaaacgggacgcgcggctcgccgggccagcccgcgtgcctgcgcagtcccctccccgagaaccatccccttgccccgcccagcgtcaggggtgcgcggccgccgagagaccccggaggcgtagccggctgcggaggcgaagaggtggcagcgcgagctgggaccagcgtctcggaggcgccgcagaattcacagatggattcagtggaaaagacaacaaatagaagtgaacaaaaatccagaaagtttttaaaaagcctcatccggaaacagccccaggaactgctcctggttatcgggactggcgtcagcgcagcagtggcccccggaatccctgccctttgctcgtggagaagctgcatcgaggccgtcatcgaggctgcagagcagctggaggtgctgcaccccggagacgtcgccgagttccggaggaaagtgacaaaggaccgggacctgttggttgtcgcccatgatctgatccggaagatgtcacctcgcacaggcgatgccaagcccagcttcttccaggactgcctgatggaggtgtttgacgacctggagcagcacatccggagtcctgtggtgctgcagtcgatcctcagcctgatggacaggggcgccatggtcctgaccaccaactatgacaacctgctggaggcctttggccggcggcagaacaagcccatggagtccctggacttgaaggacaagaccaaggtatgggctgggggtgcgggaggcctttggccggcggcagaacaagcccatggagtccctggacttgaaggacaagaccaaggtatgggctgggggtgcgggaggtctttggccggcggcagaacaagcccatggagtccctggacttgaaggacaagaccaaggtatgggctgggggtgcgggaggtctttggccggcggcagaacaagcccatggagtccctggacttgaaggacaagaccaaggtgtgggctgggggtgcgggaggtctttggccggcggcagaacaagcccatggagtccctggacttgaaggacaagaccaaggtgtgggctggggctgcgggcagcctgcaggtgtggggagttctgtgccctgggagctgctctcactttgtagcagtgaattactaataaagtagccaggcatggtggcgcctgcctgcagtccccgctactggggaggccgaggtgggaggattgcttgagcccaggagttccagactgaaatgagctgtgatcaggccacttattccagtctggacgtcggaggaagaccctgtctctaaaaataaaaaatacagtaactttgaagtttacagctgtgcacacatgtatagctggacacatttattcctgtttcaggtttccttaaccaagaaggaaaactaccaggctagctttatcagttgtgatacttaacacttgaaagacgcagatatctcatatctgtgtcctattactgcagttgaaaagttacaacttcacaagcacaaaatgatttcatgaacactttacttcttttttcacgtaatgtattttccctgttctgaatgcaacacctcttttaagtagtgctccttggcacttttgagaaattgctcatctatcaggaatgaccagggtaagtgagaaattcttaaacttggtcatcttgatataagggaattaatagctgcgagtttggcatcataaaacattgatgatggcaagcttggaaaggcctgtgctggctcgtttaattgtaacaggaaacccaggcacactcaccacacactagaacgaggttagccacagaggcaggtatatgtgaccagctgtgaacttggagaccagagaatgcacagataatccaatcgctaaagtttttgttgtttttttaaccactatcatttcttttcagaattgctaataattagcaaaatggaccaatgtaagttccatttccataaataaaagtatgattagggcaacagcttcttattaagggcagaagaaaagagctcctgcttgccatgtgtcaccctctgctcggagttccatattctcacctgacttggtttttcatggcagcatgcagtgctagtaagtagatgatttcatagacgagatgagctgagctggcacaggcacataacgtgcccagacattttgaagctgggattgggatcctggcctgactgcagagcaaaatacaccatttggtgcatcctggcaccggcccacatgtgtggctctgcagagaggcagcgggcttttctcatctctgcccccgtccgccgcttctcattccacccccacactccctggaagaacaggacccagagtaaccctgcatgtgctcgggctcctagagtggggctgagcagctttctgtcccactgagcctccctttccaggttggggcaggcaagtggattcgacaggctgccagaagactgcaaggtcattgggagttttaatctgtgactgtgtcatgaaggacatttgtactcgaattcatggagtgccactcctgatgggagaggaggcccatgacagtgacagtcatgctagtgatcgcggacaccacaccatgctgcctttgccagctggctccttcagcgagtcctcgcgccaagcctgggaggtagaggtgagggcagcgagcagcgcaggagtccgcagcccgcgcgggctgacctgcccagaagcctgttcccagtccctgccgttcccagtcactgcctcagggtggccgaggaggatgagctcttggtgtctcggctccactgactgcttttctttctccttcagatgctgatcgcgtggacagcaccacattattgggtaatgcatgccaggactgtgcaaagaggaagttagaagagaatggaattgaagtttcaaaaaaacgcacacaatcagatactgatgatgctggagggtcttgaaatctttacagtaaaacctgcaacttgaaaactagccttctgtaaccacagtgcccaaacgaagaggaatgtatggagaactccacgtggatctctgattgcgaaaccgtcacatacaccaagagagccacatgggcatgtggccctcaaggctgggtgagagggctcccctgtgtgttgaactatgcaggagggtgacgcggacacatttcaggtggactttgcaaggactgatggatagctacctcagggaccagaatccgtgggaagggatggacctggtgttcccgttcccatctgacaggctctcttttgtcaaggtggtatttttcgtaataaaaggggaagagtaaagactgtccaagcaacagtagctgccaaagagaaaatacgaaatagacactttttttttttgagtcagagtctcactctgtcacccaggacagagtgcagtggtacgatctcaagctcactgcagccaccaccgcctgggctcaagtgattctcctgcctcagcctcccgagtagctgggattacaggcgtccaccaccatgcccagctaatttttttatttttagtagagttggagtttcaccatgttggccaggatggtctcgaactcttgacctcaggtgatccacccgccttggcctcccaaagtgctaggattacaggcatgagccactgcgcccagcaaaataaacacattttataatttgtatgtggaaacatgttactatagaaagcattttaaaggtacgttttaaaggtccactgttaaatagtaaagaatgaatccgctagcgaaaatgtttttagggagaacagctggatcaaaagggcttctttggaattaggttgttttagtaacttctgttccaaagaaacacaggtctgatattgctaagaactgaaatcggaggagccagaggcccttttcagtccaggccaacattgtgcacggccactgtgggactgacaaccgggatagctcaagttcgaaagaccaggtttcaaacattataagttccaggctttgcaagtctttattctctggggtaatatccagtctttctgttattgtctcttaaaattctcttccatggcccacattaagggagtttgcagagagtgagggaggcaaaacttgaaaagggcctgcaacactttaaaccttctcaggttcacccacatgaaacagctgtgctgagtgtgctgccggtgcccggggagcttctctgactgtgacccggcagaggcttctgtggcggtgcatgagcggccctacagtggagggttctctttggaaacaaacagccctgcttggtttcagtttgaggccacttatcttcaatgtgacatttcttgccaagccctgtgacactccccattgatgactcccataggtacagataaagttaagaacaggaaacagaagggtaggatgcatagggagggagagaagccctgaaaactttttttttctttttgaagcatggaaaacaaatcttttatgccactccagccataaataaaattttaacttca

SEQ ID NO: 45 - DNA, 5577 bp, Homo sapien
cccggggcggggcctccggggaccgcggggccgttggtttcgggacggaacgttcacgcggctggggcgggcgcgcgggggaagggtttgcggcggcgccgctgccggctaacgcggaggggcgcctggaggcggcgtggcgtccgctctggctccgactccggctctcgctctcgcttctagcccgcgtgcctgcgcagtcccctccccgagaaccatccccttgccccgcccagcgtcaggggtgcgcggccgccgagagaccccggaggcgtagccggctgcggaggcgaagaggtggcagcgcgagctgggaccagcgtctcggaggcgccgcagaattcacagatggattcagtggaaaagacaacaaatagaagtgaacaaaaatccagaaagtttttaaaaagcctcatccggaaacagccccaggaactgctcctggttatcgggactggcgtcagcgcagcagtggcccccggaatccctgccctttgctcgtggagaagctgcatcgaggccgtcatcgaggctgcagagcagctggaggtgctgcaccccggagacgtcgccgagttccggaggaaagtgacaaaggaccgggacctgttggttgtcgcccatgatctgatccggaagatgtcacctcgcacaggcgatgccaagcccagcttcttccaggactgcctgatggaggtgtttgacgacctggagcagcacatccggagtcctgtggtgctgcagtcgatcctcagcctgatggacaggggcgccatggtcctgaccaccaactatgacaacctgctggaggcctttggccggcggcagaacaagcccatggagtccctggacttgaaggacaagaccaaggtatgggctgggggtgcgggaggcctttggccggcggcagaacaagcccatggagtccctggacttgaaggacaagaccaaggtatgggctgggggtgcgggaggtctttggccggcggcagaacaagcccatggagtccctggacttgaaggacaagaccaaggtatgggctgggggtgcgggaggtctttggccggcggcagaacaagcccatggagtccctggacttgaaggacaagaccaaggtgtgggctgggggtgcgggaggtctttggccggcggcagaacaagcccatggagtccctggacttgaaggacaagaccaaggtgtgggctggggctgcgggcagcctgcaggtgtggggagttctgtgccctgggagctgctctcactttgtagcagtgaattactaataaagtagccaggcatggtggcgcctgcctgcagtccccgctactggggaggccgaggtgggaggattgcttgagcccaggagttccagactgaaatgagctgtgatcaggccacttattccagtctggacgtcggaggaagaccctgtctctaaaaataaaaaatacagtaactttgaagtttacagctgtgcacacatgtatagctggacacatttattcctgtttcaggtttccttaaccaagaaggaaaactaccaggctagctttatcagttgtgatacttaacacttgaaagacgcagatatctcatatctgtgtcctattactgcagttgaaaagttacaacttcacaagcacaaaatgatttcatgaacactttacttcttttttcacgtaatgtattttccctgttctgaatgcaacacctcttttaagtagtgctccttggcacttttgagaaattgctcatctatcaggaatgaccagggtaagtgagaaattcttaaacttggtcatcttgatataagggaattaatagctgcgagtttggcatcataaaacattgatgatggcaagcttggaaaggcctgtgctggctcgtttaattgtaacaggaaacccaggcacactcaccacacactagaacgaggttagccacagaggcaggtatatgtgaccagctgtgaacttggagaccagagaatgcacagataatccaatcgctaaagtttttgttgtttttttaaccactatcatttcttttcagaattgctaataattagcaaaatggaccaatgtaagttccatttccataaataaaagtatgattagggcaacagcttcttattaagggcagaagaaaagagctcctgcttgccatgtgtcaccctctgctcggagttccatattctcacctgacttggtttttcatggcagcatgcagtgctagtaagtagatgatttcatagacgagatgagctgagctggcacaggcacataacgtgcccagacattttgaagctgggattgggatcctggcctgactgcagagcaaaatacaccatttggtgcatcctggcaccggcccacatgtgtggctctgcagagaggcagcgggcttttctcatctctgcccccgtccgccgcttctcattccacccccacactccctggaagaacaggacccagagtaaccctgcatgtgctcgggctcctagagtggggctgagcagctttctgtcccactgagcctccctttccaggttggggcaggcaagtggattcgacaggctgccagaagactgcaaggtcattgggagttttaatctgtgactgtgtcatgaaggacatttgtactcgaattcatggagtgccactcctgatgggagaggaggcccatgacagtgacagtcatgctagtgatcgcggacaccacaccatgctgcctttgccagctggctccttcagcgagtcctcgcgccaagcctgggaggtagaggtgagggcagcgagcagcgcaggagtccgcagcccgcgcgggctgacctgcccagaagcctgttcccagtccctgccgttcccagtcactgcctcagggtggccgaggaggatgagctcttggtgtctcggctccactgactgcttttctttctccttcagatgctgatcgcgtggacagcaccacattattggtaaagcagatctttcttcttgccagcctgttttttgcctacacattccattgtcttctgtcactaactgtaaaatcataaacgtttgtttttcaccttaaataattagcttgtattaaaacagccccactgaagatgataaatagccatgccttagcatggtccctgccacaccaagagactaaaagccatccctttgacgaggaagcacagccgaatcacacgtgagccagctggcacctgagaataatttcttgccctagaaccaagagtgacgggacttggaacaggttctatttgtgtgataccatgtggtgccagatgcagtgccttagaatgacccagctcttccgaaatgttcgttgcacgggtctgagcttgcacacagaagcttcctatttaatacttgttttgaaatgtgaacgctcttcttgctgggctcaattctgcctgtttataaatttaacaagactcggtggccatgagcgtcctcctgtgtgtgcgctgggcaccaggtgcctccccttgccgaatcatttgggtaaaagggactctggtgagtggcgcggaggcctctgtgcgcagccctgttttccctggctgtttggcccagcgcgttcacagatgggaaaacgcgcatcgatgtgggagctgctcgcctcacatccatgttagtggtgcaggaagtatgaaaccgccgcagtcggctccccgttgccacctattcccatgcgaaaggacatcttcattacacttgctttctcactgaaatgcgactcctggaagcatggctctctttggagagaagccgtagcgtggttgatgtcatctctagtggatggcagggtctgcttggccagtgcttcagtaaggtcacattatgaactgtgccttggcgagtggattctgaataaacaagcttcttaataaattcttctcttttaggtaatgcatgccaggactgtgcaaagaggaagttagaagagaatggaattgaagtttcaaaaaaacgcacacaatcagatactgatgatgctggagggtcttgaaatctttacagtaaaacctgcaacttgaaaactagccttctgtaaccacagtgcccaaacgaagaggaatgtatggagaactccacgtggatctctgattgcgaaaccgtcacatacaccaagagagccacatgggcatgtggccctcaaggctgggtgagagggctcccctgtgtgttgaactatgcaggagggtgacgcggacacatttcaggtggactttgcaaggactgatggatagctacctcagggaccagaatccgtgggaagggatggacctggtgttcccgttcccatctgacaggctctcttttgtcaaggtggtatttttcgtaataaaaggggaagagtaaagactgtccaagcaacagtagctgccaaagagaaaatacgaaatagacactttttttttttgagtcagagtctcactctgtcacccaggacagagtgcagtggtacgatctcaagctcactgcagccaccaccgcctgggctcaagtgattctcctgcctcagcctcccgagtagctgggattacaggcgtccaccaccatgcccagctaatttttttatttttagtagagttggagtttcaccatgttggccaggatggtctcgaactcttgacctcaggtgatccacccgccttggcctcccaaagtgctaggattacaggcatgagccactgcgcccagcaaaataaacacattttataatttgtatgtggaaacatgttactatagaaagcattttaaaggtacgttttaaaggtccactgttaaatagtaaagaatgaatccgctagcgaaaatgtttttagggagaacagctggatcaaaagggcttctttggaattaggttgttttagtaacttctgttccaaagaaacacaggtctgatattgctaagaactgaaatcggaggagccagaggcccttttcagtccaggccaacattgtgcacggccactgtgggactgacaaccgggatagctcaagttcgaaagaccaggtttcaaacattataagttccaggctttgcaagtctttattctctggggtaatatccagtctttctgttattgtctcttaaaattctcttccatggcccacattaagggagtttgcagagagtgagggaggcaaaacttgaaaagggcctgcaacactttaaaccttctcaggttcacccacatgaaacagctgtgctgagtgtgctgccggtgcccggggagcttctctgactgtgacccggcagaggcttctgtggcggtgcatgagcggccctacagtggagggttctctttggaaacaaacagccctgcttggtttcagtttgaggccacttatcttcaatgtgacatttcttgccaagccctgtgacactccccattgatgactcccataggtacagataaagttaagaacaggaaacagaagggtaggatgcatagggagggagagaagccctgaaaactttttttttctttttgaagcatggaaaacaaatcttttatgccactccagccataaataaaattttaacttca

SEQ ID NO: 46 - DNA, 3915 bp, Homo sapien
cccggggcggggcctccggggaccgcggggccgttggtttcgggacggaacgttcacgcggctggggcgggcgcgcgggggaagggtttgcggcggcgccgctgccggctaacgcggaggggcgcctggaggcggcgtggcgtccgctctggctccgactccggctctcgctctcgcttctagcccgcgtgcctgcgcagtcccctccccgagaaccatccccttgccccgcccagcgtcaggggtgcgcggccgccgagagaccccggaggcgtagccggctgcggaggcgaagaggtggcagcgcgagctgggaccagcgtctcggaggcgccgcagaattcacagatggattcagtggaaaagacaacaaatagaagtgaacaaaaatccagaaagtttttaaaaagcctcatccggaaacagccccaggaactgctcctggttatcgggactggcgtcagcgcagcagtggcccccggaatccctgccctttgctcgtggagaagctgcatcgaggccgtcatcgaggctgcagagcagctggaggtgctgcaccccggagacgtcgccgagttccggaggaaagtgacaaaggaccgggacctgttggttgtcgcccatgatctgatccggaagatgtcacctcgcacaggcgatgccaagcccagcttcttccaggactgcctgatggaggtgtttgacgacctggagcagcacatccggagtcctgtggtgctgcagtcgatcctcagcctgatggacaggggcgccatggtcctgaccaccaactatgacaacctgctggaggcctttggccggcggcagaacaagcccatggagtccctggacttgaaggacaagaccaaggtccttgaatgggcaagagggcacatgaagtacggcgtcctccacattcacggcctctacacggacccctgcggggtggtgctggacccatcggggtataaagacgtcactcaagacgcagaagtcatggaagtcctccagaacttataccgcaccaagtcctttctgtttgtgggctgtggggagacccttcgtgatcagatattccaggccctctttctttactccgtgccgaataaggtggatttggagcactacatgcttgtgctgaaggagaatgaagaccatttctttaagcatcaggcagatatgcttctgcacggaatcaaagttgtatcctacggggactgttttgaccactttccaggatatgtgcaagaccttgccactcagatctgcaaacagcaaagcccagatgctgatcgcgtggacagcaccacattattggtaaagcagatctttcttcttgccagcctgttttttgcctacacattccattgtcttctgtcactaactgtaaaatcataaacgtttgtttttcaccttaaataattagcttgtattaaaacagccccactgaagatgataaatagccatgccttagcatggtccctgccacaccaagagactaaaagccatccctttgacgaggaagcacagccgaatcacacgtgagccagctggcacctgagaataatttcttgccctagaaccaagagtgacgggacttggaacaggttctatttgtgtgataccatgtggtgccagatgcagtgccttagaatgacccagctcttccgaaatgttcgttgcacgggtctgagcttgcacacagaagcttcctatttaatacttgttttgaaatgtgaacgctcttcttgctgggctcaattctgcctgtttataaatttaacaagactcggtggccatgagcgtcctcctgtgtgtgcgctgggcaccaggtgcctccccttgccgaatcatttgggtaaaagggactctggtgagtggcgcggaggcctctgtgcgcagccctgttttccctggctgtttggcccagcgcgttcacagatgggaaaacgcgcatcgatgtgggagctgctcgcctcacatccatgttagtggtgcaggaagtatgaaaccgccgcagtcggctccccgttgccacctattcccatgcgaaaggacatcttcattacacttgctttctcactgaaatgcgactcctggaagcatggctctctttggagagaagccgtagcgtggttgatgtcatctctagtggatggcagggtctgcttggccagtgcttcagtaaggtcacattatgaactgtgccttggcgagtggattctgaataaacaagcttcttaataaattcttctcttttaggtaatgcatgccaggactgtgcaaagaggaagttagaagagaatggaattgaagtttcaaaaaaacgcacacaatcagatactgatgatgctggagggtcttgaaatctttacagtaaaacctgcaacttgaaaactagccttctgtaaccacagtgcccaaacgaagaggaatgtatggagaactccacgtggatctctgattgcgaaaccgtcacatacaccaagagagccacatgggcatgtggccctcaaggctgggtgagagggctcccctgtgtgttgaactatgcaggagggtgacgcggacacatttcaggtggactttgcaaggactgatggatagctacctcagggaccagaatccgtgggaagggatggacctggtgttcccgttcccatctgacaggctctcttttgtcaaggtggtatttttcgtaataaaaggggaagagtaaagactgtccaagcaacagtagctgccaaagagaaaatacgaaatagacactttttttttttgagtcagagtctcactctgtcacccaggacagagtgcagtggtacgatctcaagctcactgcagccaccaccgcctgggctcaagtgattctcctgcctcagcctcccgagtagctgggattacaggcgtccaccaccatgcccagctaatttttttatttttagtagagttggagtttcaccatgttggccaggatggtctcgaactcttgacctcaggtgatccacccgccttggcctcccaaagtgctaggattacaggcatgagccactgcgcccagcaaaataaacacattttataatttgtatgtggaaacatgttactatagaaagcattttaaaggtacgttttaaaggtccactgttaaatagtaaagaatgaatccgctagcgaaaatgtttttagggagaacagctggatcaaaagggcttctttggaattaggttgttttagtaacttctgttccaaagaaacacaggtctgatattgctaagaactgaaatcggaggagccagaggcccttttcagtccaggccaacattgtgcacggccactgtgggactgacaaccgggatagctcaagttcgaaagaccaggtttcaaacattataagttccaggctttgcaagtctttattctctggggtaatatccagtctttctgttattgtctcttaaaattctcttccatggcccacattaagggagtttgcagagagtgagggaggcaaaacttgaaaagggcctgcaacactttaaaccttctcaggttcacccacatgaaacagctgtgctgagtgtgctgccggtgcccggggagcttctctgactgtgacccggcagaggcttctgtggcggtgcatgagcggccctacagtggagggttctctttggaaacaaacagccctgcttggtttcagtttgaggccacttatcttcaatgtgacatttcttgccaagccctgtgacactccccattgatgactcccataggtacagataaagttaagaacaggaaacagaagggtaggatgcatagggagggagagaagccctgaaaactttttttttctttttgaagcatggaaaacaaatcttttatgccactccagccataaataaaattttaacttca

SEQ ID NO: 47 - DNA, 4215 bp, Homo sapien
cccggggcggggcctccggggaccgcggggccgttggtttcgggacggaacgttcacgcggctggggcgggcgcgcgggggaagggtttgcggcggcgccgctgccggctaacgcggaggggcgcctggaggcggcgtggcgtccgctctggctccgactccggctctcgctctcgcttctagcccgcgtgcctgcgcagtcccctccccgagaaccatccccttgccccgcccagcgtcaggggtgcgcggccgccgagagaccccggaggcgtagccggctgcggaggcgaagaggtggcagcgcgagctgggaccagcgtctcggaggcgccgcagaattcacagatggattcagtggaaaagacaacaaatagaagtgaacaaaaatccagaaagtttttaaaaagcctcatccggaaacagccccaggaactgctcctggttatcgggactggcgtcagcgcagcagtggcccccggaatccctgccctttgctcgtggagaagctgcatcgaggccgtcatcgaggctgcagagcagctggaggtgctgcaccccggagacgtcgccgagttccggaggaaagtgacaaaggaccgggacctgttggttgtcgcccatgatctgatccggaagatgtcacctcgcacaggcgatgccaagcccagcttcttccaggactgcctgatggaggtgtttgacgacctggagcagcacatccggagtcctgtggtgctgcagtcgatcctcagcctgatggacaggggcgccatggtcctgaccaccaactatgacaacctgctggaggcctttggccggcggcagaacaagcccatggagtccctggacttgaaggacaagaccaaggtatgggctgggggtgcgggaggcctttggccggcggcagaacaagcccatggagtccctggacttgaaggacaagaccaaggtatgggctgggggtgcgggaggtctttggccggcggcagaacaagcccatggagtccctggacttgaaggacaagaccaaggtatgggctgggggtgcgggaggtctttggccggcggcagaacaagcccatggagtccctggacttgaaggacaagaccaaggtgtgggctgggggtgcgggaggtctttggccggcggcagaacaagcccatggagtccctggacttgaaggacaagaccaaggtgtgggctggggctgcgggcagcctgcaggtgtggggagttctgtgccctgggagctgctctcactttgtagcagtgaattactaataaagtagccaggcatggtggcgcctgcctgcagtccccgctactggggaggccgaggtgggaggattgcttgagcccaggagttccagactgaaatgagctgtgatcaggccacttattccagtctggacgtcggaggaagaccctgtctctaaaaataaaaaatacagtaactttgaagtttacagctgtgcacacatgtatagctggacacatttattcctgtttcaggtttccttaaccaagaaggaaaactaccaggctagctttatcagttgtgatacttaacacttgaaagacgcagatatctcatatctgtgtcctattactgcagttgaaaagttacaacttcacaagcacaaaatgatttcatgaacactttacttcttttttcacgtaatgtattttccctgttctgaatgcaacacctcttttaagtagtgctccttggcacttttgagaaattgctcatctatcaggaatgaccagggtaagtgagaaattcttaaacttggtcatcttgatataagggaattaatagctgcgagtttggcatcataaaacattgatgatggcaagcttggaaaggcctgtgctggctcgtttaattgtaacaggaaacccaggcacactcaccacacactagaacgaggttagccacagaggcaggtatatgtgaccagctgtgaacttggagaccagagaatgcacagataatccaatcgctaaagtttttgttgtttttttaaccactatcatttcttttcagaattgctaataattagcaaaatggaccaatgtaagttccatttccataaataaaagtatgattagggcaacagcttcttattaagggcagaagaaaagagctcctgcttgccatgtgtcaccctctgctcggagttccatattctcacctgacttggtttttcatggcagcatgcagtgctagtaagtagatgatttcatagacgagatgagctgagctggcacaggcacataacgtgcccagacattttgaagctgggattgggatcctggcctgactgcagagcaaaatacaccatttggtgcatcctggcaccggcccacatgtgtggctctgcagagaggcagcgggcttttctcatctctgcccccgtccgccgcttctcattccacccccacactccctggaagaacaggacccagagtaaccctgcatgtgctcgggctcctagagtggggctgagcagctttctgtcccactgagcctccctttccaggttggggcaggcaagtggattcgacaggctgccagaagactgcaaggtcattgggagttttaatctgtgactgtgtcatgaaggacatttgtactcgaattcatggagtgccactcctgatgggagaggaggcccatgacagtgacagtcatgctagtgatcgcggacaccacaccatgctgcctttgccagctggctccttcagcgagtcctcgcgccaagcctgggaggtagaggtgagggcagcgagcagcgcaggagtccgcagcccgcgcgggctgacctgcccagaagcctgttcccagtccctgccgttcccagtcactgcctcagggtggccgaggaggatgagctcttggtgtctcggctccactgactgcttttctttctccttcagatgctgatcgcgtggacagcaccacattattgggtaatgcatgccaggactgtgcaaagaggaagttagaagagaatggaattgaagtttcaaaaaaacgcacacaatcagatactgatgatgctggagggtcttgaaatctttacagtaaaacctgcaacttgaaaactagccttctgtaaccacagtgcccaaacgaagaggaatgtatggagaactccacgtggatctctgattgcgaaaccgtcacatacaccaagagagccacatgggcatgtggccctcaaggctgggtgagagggctcccctgtgtgttgaactatgcaggagggtgacgcggacacatttcaggtggactttgcaaggactgatggatagctacctcagggaccagaatccgtgggaagggatggacctggtgttcccgttcccatctgacaggctctcttttgtcaaggtggtatttttcgtaataaaaggggaagagtaaagactgtccaagcaacagtagctgccaaagagaaaatacgaaatagacactttttttttttgagtcagagtctcactctgtcacccaggacagagtgcagtggtacgatctcaagctcactgcagccaccaccgcctgggctcaagtgattctcctgcctcagcctcccgagtagctgggattacaggcgtccaccaccatgcccagctaatttttttatttttagtagagttggagtttcaccatgttggccaggatggtctcgaactcttgacctcaggtgatccacccgccttggcctcccaaagtgctaggattacaggcatgagccactgcgcccagcaaaataaacacattttataatttgtatgtggaaacatgttactatagaaagcattttaaaggtacgttttaaaggtccactgttaaatagtaaagaatgaatccgctagcgaaaatgtttttagggagaacagctggatcaaaagggcttctttggaattaggttgttttagtaacttctgttccaaagaaacacaggtctgatattgctaagaactgaaatcggaggagccagaggcccttttcagtccaggccaacattgtgcacggccactgtgggactgacaaccgggatagctcaagttcgaaagaccaggtttcaaacattataagttccaggctttgcaagtctttattctctggggtaatatccagtctttcaagttttgcctccctcactctctgcaactccttwatgtgggccatggaagagaat

SEQ ID NO: 48 - DNA, 4844 bp, Homo sapien
cccggggcggggcctccggggaccgcggggccgttggtttcgggacggaacgttcacgcggctggggcgggcgcgcgggggaagggtttgcggcggcgccgctgccggctaacgcggaggggcgcctggaggcggcgtggcgtccgctctggctccgactccggctctcgctctcgcttctagcccgcgtgcctgcgcagtcccctccccgagaaccatccccttgccccgcccagcgtcaggggtgcgcggccgccgagagaccccggaggcgtagccggctgcggaggcgaagaggtggcagcgcgagctgggaccagcgtctcggaggcgccgcagaattcacagatggattcagtggaaaagacaacaaatagaagtgaacaaaaatccagaaagtttttaaaaagcctcatccggaaacagccccaggaactgctcctggttatcgggactggcgtcagcgcagcagtggcccccggaatccctgccctttgctcgtggagaagctgcatcgaggccgtcatcgaggctgcagagcagctggaggtgctgcaccccggagacgtcgccgagttccggaggaaagtgacaaaggaccgggacctgttggttgtcgcccatgatctgatccggaagatgtcacctcgcacaggcgatgccaagcccagcttcttccaggactgcctgatggaggtgtttgacgacctggagcagcacatccggagtcctgtggtgctgcagtcgatcctcagcctgatggacaggggcgccatggtcctgaccaccaactatgacaacctgctggaggcctttggccggcggcagaacaagcccatggagtccctggacttgaaggacaagaccaaggtatgggctgggggtgcgggaggcctttggccggcggcagaacaagcccatggagtccctggacttgaaggacaagaccaaggtatgggctgggggtgcgggaggtctttggccggcggcagaacaagcccatggagtccctggacttgaaggacaagaccaaggtatgggctgggggtgcgggaggtctttggccggcggcagaacaagcccatggagtccctggacttgaaggacaagaccaaggtgtgggctgggggtgcgggaggtctttggccggcggcagaacaagcccatggagtccctggacttgaaggacaagaccaaggtgtgggctggggctgcgggcagcctgcaggtgtggggagttctgtgccctgggagctgctctcactttgtagcagtgaattactaataaagtagccaggcatggtggcgcctgcctgcagtccccgctactggggaggccgaggtgggaggattgcttgagcccaggagttccagactgaaatgagctgtgatcaggccacttattccagtctggacgtcggaggaagaccctgtctctaaaaataaaaaatacagtaactttgaagtttacagctgtgcacacatgtatagctggacacatttattcctgtttcaggtttccttaaccaagaaggaaaactaccaggctagctttatcagttgtgatacttaacacttgaaagacgcagatatctcatatctgtgtcctattactgcagttgaaaagttacaacttcacaagcacaaaatgatttcatgaacactttacttcttttttcacgtaatgtattttccctgttctgaatgcaacacctcttttaagtagtgctccttggcacttttgagaaattgctcatctatcaggaatgaccagggtaagtgagaaattcttaaacttggtcatcttgatataagggaattaatagctgcgagtttggcatcataaaacattgatgatggcaagcttggaaaggcctgtgctggctcgtttaattgtaacaggaaacccaggcacactcaccacacactagaacgaggttagccacagaggcaggtatatgtgaccagctgtgaacttggagaccagagaatgcacagataatccaatcgctaaagtttttgttgtttttttaaccactatcatttcttttcagaattgctaataattagcaaaatggaccaatgtaagttccatttccataaataaaagtatgattagggcaacagcttcttattaagggcagaagaaaagagctcctgcttgccatgtgtcaccctctgctcggagttccatattctcacctgacttggtttttcatggcagcatgcagtgctagtaagtagatgatttcatagacgagatgagctgagctggcacaggcacataacgtgcccagacattttgaagctgggattgggatcctggcctgactgcagagcaaaatacaccatttggtgcatcctggcaccggcccacatgtgtggctctgcagagaggcagcgggcttttctcatctctgcccccgtccgccgcttctcattccacccccacactccctggaagaacaggacccagagtaaccctgcatgtgctcgggctcctagagtggggctgagcagctttctgtcccactgagcctccctttccaggttggggcaggcaagtggattcgacaggctgccagaagactgcaaggtcattgggagttttaatctgtgactgtgtcatgaaggacatttgtactcgaattcatggagtgccactcctgatgggagaggaggcccatgacagtgacagtcatgctagtgatcgcggacaccacaccatgctgcctttgccagctggctccttcagcgagtcctcgcgccaagcctgggaggtagaggtgagggcagcgagcagcgcaggagtccgcagcccgcgcgggctgacctgcccagaagcctgttcccagtccctgccgttcccagtcactgcctcagggtggccgaggaggatgagctcttggtgtctcggctccactgactgcttttctttctccttcagatgctgatcgcgtggacagcaccacattattggtgccaggactgtgcaaagaggaagttagaagagaatggaattgaagtttcaaaaaaacgcacacaatcagatactggtaatgcatgccaggactgtgcaaagaggaagttagaagagaatggaattgaagtttcaaaaaaacgcacacaatcagatactggtgtctgtgccatcctcatgctcgcgggagttttggcatgggattctccgttgtgattcccccggactccactgtctgaagaccaggtttcctatgaagagggtctgatgggaacctgttcccagtgatttgaagatgatgctggagggtcttgaaatctttacagtaaaacctgcaacttgaaaactagccttctgtaaccacagtgcccaaacgaagaggaatgtatggagaactccacgtggatctctgattgcgaaaccgtcacatacaccaagagagccacatgggcatgtggccctcaaggctgggtgagagggctcccctgtgtgttgaactatgcaggagggtgacgcggacacatttcaggtggactttgcaaggactgatggatagctacctcagggaccagaatccgtgggaagggatggacctggtgttcccgttcccatctgacaggctctcttttgtcaaggtggtatttttcgtaataaaaggggaagagtaaagactgtccaagcaacagtagctgccaaagagaaaatacgaaatagacactttttttttttgagtcagagtctcactctgtcacccaggacagagtgcagtggtacgatctcaagctcactgcagccaccaccgcctgggctcaagtgattctcctgcctcagcctcccgagtagctgggattacaggcgtccaccaccatgcccagctaatttttttatttttagtagagttggagtttcaccatgttggccaggatggtctcgaactcttgacctcaggtgatccacccgccttggcctcccaaagtgctaggattacaggcatgagccactgcgcccagcaaaataaacacattttataatttgtatgtggaaacatgttactatagaaagcattttaaaggtacgttttaaaggtccactgttaaatagtaaagaatgaatccgctagcgaaaatgtttttagggagaacagctggatcaaaagggcttctttggaattaggttgttttagtaacttctgttccaaagaaacacaggtctgatattgctaagaactgaaatcggaggagccagaggcccttttcagtccaggccaacattgtgcacggccactgtgggactgacaaccgggatagctcaagttcgaaagaccaggtttcaaacattataagttccaggctttgcaagtctttattctctggggtaatatccagtctttctgttattgtctcttaaaattctcttccatggcccacattaagggagtttgcagagagtgagggaggcaaaacttgaaaagggcctgcaacactttaaaccttctcaggttcacccacatgaaacagctgtgctgagtgtgctgccggtgcccggggagcttctctgactgtgacccggcagaggcttctgtggcggtgcatgagcggccctacagtggagggttctctttggaaacaaacagccctgcttggtttcagtttgaggccacttatcttcaatgtgacatttcttgccaagccctgtgacactccccattgatgactcccataggtacagataaagttaagaacaggaaacagaagggtaggatgcatagggagggagagaagccctgaaaactttttttttctttttgaagcatggaaaacaaatcttttatgccactccagccataaataaaattttaacttca

SEQ ID NO: 49 - DNA, 4520 bp, Homo sapien
cccggggcggggcctccggggaccgcggggccgttggtttcgggacggaacgttcacgcggctggggcgggcgcgcgggggaagggtttgcggcggcgccgctgccggctaacgcggaggggcgcctggaggcggcgtggcgtccgctctggctccgactccggctctcgctctcgcttctagcccgcgtgcctgcgcagtcccctccccgagaaccatccccttgccccgcccagcgtcaggggtgcgcggccgccgagagaccccggaggcgtagccggctgcggaggcgaagaggtggcagcgcgagctgggaccagcgtctcggaggcgccgcagaattcacagatggattcagtggaaaagacaacaaatagaagtgaacaaaaatccagaaagtttttaaaaagcctcatccggaaacagccccaggaactgctcctggttatcgggactggcgtcagcgcagcagtggcccccggaatccctgccctttgctcgtggagaagctgcatcgaggccgtcatcgaggctgcagagcagctggaggtgctgcaccccggagacgtcgccgagttccggaggaaagtgacaaaggaccgggacctgttggttgtcgcccatgatctgatccggaagatgtcacctcgcacaggcgatgccaagcccagcttcttccaggactgcctgatggaggtgtttgacgacctggagcagcacatccggagtcctgtggtgctgcagtcgatcctcagcctgatggacaggggcgccatggtcctgaccaccaactatgacaacctgctggaggcctttggccggcggcagaacaagcccatggagtccctggacttgaaggacaagaccaaggtatgggctgggggtgcgggaggcctttggccggcggcagaacaagcccatggagtccctggacttgaaggacaagaccaaggtatgggctgggggtgcgggaggtctttggccggcggcagaacaagcccatggagtccctggacttgaaggacaagaccaaggtatgggctgggggtgcgggaggtctttggccggcggcagaacaagcccatggagtccctggacttgaaggacaagaccaaggtgtgggctgggggtgcgggaggtctttggccggcggcagaacaagcccatggagtccctggacttgaaggacaagaccaaggtgtgggctggggctgcgggcagcctgcaggtgtggggagttctgtgccctgggagctgctctcactttgtagcagtgaattactaataaagtagccaggcatggtggcgcctgcctgcagtccccgctactggggaggccgaggtgggaggattgcttgagcccaggagttccagactgaaatgagctgtgatcaggccacttattccagtctggacgtcggaggaagaccctgtctctaaaaataaaaaatacagtaactttgaagtttacagctgtgcacacatgtatagctggacacatttattcctgtttcaggtttccttaaccaagaaggaaaactaccaggctagctttatcagttgtgatacttaacacttgaaagacgcagatatctcatatctgtgtcctattactgcagttgaaaagttacaacttcacaagcacaaaatgatttcatgaacactttacttcttttttcacgtaatgtattttccctgttctgaatgcaacacctcttttaagtagtgctccttggcacttttgagaaattgctcatctatcaggaatgaccagggtaagtgagaaattcttaaacttggtcatcttgatataagggaattaatagctgcgagtttggcatcataaaacattgatgatggcaagcttggaaaggcctgtgctggctcgtttaattgtaacaggaaacccaggcacactcaccacacactagaacgaggttagccacagaggcaggtatatgtgaccagctgtgaacttggagaccagagaatgcacagataatccaatcgctaaagtttttgttgtttttttaaccactatcatttcttttcagaattgctaataattagcaaaatggaccaatgtaagttccatttccataaataaaagtatgattagggcaacagcttcttattaagggcagaagaaaagagctcctgcttgccatgtgtcaccctctgctcggagttccatattctcacctgacttggtttttcatggcagcatgcagtgctagtaagtagatgatttcatagacgagatgagctgagctggcacaggcacataacgtgcccagacattttgaagctgggattgggatcctggcctgactgcagagcaaaatacaccatttggtgcatcctggcaccggcccacatgtgtggctctgcagagaggcagcgggcttttctcatctctgcccccgtccgccgcttctcattccacccccacactccctggaagaacaggacccagagtaaccctgcatgtgctcgggctcctagagtggggctgagcagctttctgtcccactgagcctccctttccaggttggggcaggcaagtggattcgacaggctgccagaagactgcaaggtcattgggagttttaatctgtgactgtgtcatgaaggacatttgtactcgaattcatggagtgccactcctgatgggagaggaggcccatgacagtgacagtcatgctagtgatcgcggacaccacaccatgctgcctttgccagctggctccttcagcgagtcctcgcgccaagcctgggaggtagaggtgagggcagcgagcagcgcaggagtccgcagcccgcgcgggctgacctgcccagaagcctgttcccagtccctgccgttcccagtcactgcctcagggtggccgaggaggatgagctcttggtgtctcggctccactgactgcttttctttctccttcagatgctgatcgcgtggacagcaccacattattggtaaagcagatctttcttcttgccagcctgttttttgcctacacattccattgtcttctgtcactaactgtaaaatcataaacgtttgtttttcaccttaaataattagcttgtattaaaacagccccactgaagatgataaatagccatgccttagcatggtccctgccacaccaagagactaaaagccatccctttgacgaggaagcacagccgaatcacacgtgagccagctggcacctgagaataatttcttgccctagaaccaagagtgacgggacttggaacaggttctatttgtgtgataccatgtggtgccagatgcagtgccttagaatgacccagctcttccgaaatgttcgttgcacgggtctgagcttgcacacagaagcttcctatttaatacttgttttgaaatgtgaacgctcttcttgctgggctcaattctgcctgtttataaatttaacaagactcggtggccatgagcgtcctcctgtgtgtgcgctgggcaccaggtgcctccccttgccgaatcatttgggtaaaagggactctggtgagtggcgcggaggcctctgtgcgcagccctgttttccctggctgtttggcccagcgcgttcacagatgggaaaacgcgcatcgatgtgggagctgctcgcctcacatccatgttagtggtgcaggaagtatgaaaccgccgcagtcggctccccgttgccacctattcccatgcgaaaggacatcttcattacacttgctttctcactgaaatgcgactcctggaagcatggctctctttggagagaagccgtagcgtggttgatgtcatctctagtggatggcagggtctgcttggccagtgcttcagtaaggtcacattatgaactgtgccttggcgagtggattctgaataaacaagcttcttaataaattcttctcttttaggtaatgcatgccaggactgtgcaaagaggaagttagaagagaatggaattgaagtttcaaaaaaacgcacacaatcagatactggtgtctgtgccatcctcatgctcgcgggagttttggcatgggattctccgttgtgattcccccggactccactgtctgaagaccaggtttcctatgaagagggtctgatgggaacctgttcccagtgatttgaagatgatgctggagggtcttgaaatctttacagtaaaacctgcaacttgaaaactagccttctgtaaccacagtgcccaaacgaagaggaatgtatggagaactccacgtggatctctgattgcgaaaccgtcacatacaccaagagagccacatgggcatgtggccctcaaggctgggtgagagggctcccctgtgtgttgaactatgcaggagggtgacgcggacacatttcaggtggactttgcaaggactgatggatagctacctcagggaccagaatccgtgggaagggatggacctggtgttcccgttcccatctgacaggctctcttttgtcaaggtggtatttttcgtaataaaaggggaagagtaaagac

SEQ ID NO: 50 - DNA, 301 bp, Homo sapien
gaggtatccccccctccccgggtcgagactgaccatgaaacaggtcatgcctgatctgccgtggtctaaggcgttctatccatcgacatcgccgtgaagtgtgagagcaatgggcagccggggaacaactacgagaccacgcctcccgtgctggactccgacggctccttcttcctctatagcatgctcaccgtgtactagagcaggtggcagtaggggaacgtcttctcatgctccgtgatgcatgaggctctgtacaaccactacacgcagaagagcctctccctgtaccccgggaggg

SEQ ID NO: 51 - DNA, 2029 bp, Homo sapien
ccctgggaacaagtccttggtccctggggcctggtgtcttgagtgagaggctgtaattaggaaaccacacgctcagggcagacagctcttggggactctgccgttagccccttccttacaaacacatcacctcatccctcggggcacttgatagcagacaagaagttccagaaaggcttacatttactaaaagtttatttcaaatctgcctccaagtccatgtgttctgaaaaggacagagggggccttggagtgcagccagatggaaggactttgaaggctgtccaagtgctgctttcagagtgcaccaagtttttattgtccctgactgtggctccctgcctgtttgtcaggcgggagcctggagcctgcacagggacagagctggtttcatccggcactccctagccctggacaccctccttgtctcgcctgccctcctgcaggccttcactctcccctgaggctgtcctggcccggactgtggggagcacctccaccccccggagcaggtgcacacccaggggatgccctggacctaagtgacatcaactcagagcctcctcggggctccttcccctcctttgagcctcggaacctcctcagcctgtttgaggacaccctagacccaacctgagccccagactctgcctctgcacttttaaccttttatcctgtgtctctcccgtcgcccttgaaagctggggcccctcgggaactcccatggtcttctctgcctggccgtgtctaataaaaagtatttgaaccttgggagcacccaagcttgctcatgtggcaacatggcccttcctgtccctttattgatgtcatccagggtcttaacgcccctgaggctgagccctgctgcagaacccagcgctcctggccttgggccagcagctgaagccccatgctgtgtggagcaaagaggtttcctgagcaggcacatcccccggtgggtacctggagctgttgggagtatggcactcaaggtggagggcaggcacggcccaggggtcccaggatctgaggccgctgagctccctgtgtcagtttcctggaagaagcagctgcagcccttgtgcctgtggccagctggtacaagacgggtccacgcccccttggtccttttgtcctgaatgccttactccatagtctctgggcagagggagccagggcgggcaagcttgtggctgctgggagggctggtatgcagggcagaaagatggagatcaggaagactggccacaggcctggtgggaggaacaggatagggtgaggaggctctgggctggcggcctggcaggacttgaactctcagagcaagacgtgaccccagagtccctctctggtctaaccccacaggtcacagagggtaaagaggtcccaagagggaaaggtttccttccagctgacacagtaaaataggagcttggagggaaaaggcagggaaggaagttggagcgccacggcgtgggtggaagaggtcagtccacagggaagaacgggtgaacagggctcctgctgagacatctcatgagctggaagcatccaaggagccagccccttgcagacgagttgggaggaacacctggtgttgctaactctaggaggctgctgtgggcaggctggcatggcagctcagtcccggggacaggcgtggtgggcagcccagagcaggtcgggcacgacgccggcgtgcagctgcaggatggagcccacgctcagcaggtgcatgatctggtgggagttgccccagtagtcaaagcggccaggtccccagcgctcgggcagacgggctacatttaccagtcccccaagcagcgccagtgcgtccatgcgcaggtagcagggcagggagcctggagcccctgaacccagacccactccccgggccccaaataccagtaggcgggcagcagcctgccatccaaatgcccggagccgagcactggtggagggggcggtgagagcacgccagccggccacacccgacaacacagtgtagcccaccagggcagccgggcgc

SEQ ID NO: 52 - DNA, 3551 bp, Homo sapien
cgaggccggtttggaatttttggcgcgagcagctccgcgcgcgttcacgggccgttccccctcacgggagtcctccgcccgggcgtccggaacagtcgacggcagactccggcccgctgagccacccgaggggtcccgtggcctccgcggacccggaatctgggccctcgcggacccgcgccccgcccagtcgccccagggcttccccacacccacggagtgaagtcagccgcggccctgcctgggaggaacttaccgtctaccgggaaaggtggccagcagatgtgtcgggcctggtgagagggtgaggcgagacggcccgatcgcccagggccccggaagctgcggaggtcacccccgcctggccttagctcagggacaccctggattcacgtgggagcccctgctcctgcctcccccgtcccaccactgaggctgttgggccaggccagtcatgctagaacggcctcctgcactggccatgcccatgcccacggagggcaccccgccacctctgagtggcacccccatcccagtcccagcctacttccgccacgcagaacctggattctccctcaagaggcccagggggctcagccggagcctcccacctccgccccctgccaagggcagcattcccatcagccgcctcttccctcctcggaccccaggctggcaccagctgcagccccggcgggtgtcattccggggcgaggcctcagagactctgcagagccctgggtatgacccaagccggccagagtccttcttccagcagagcttccagaggctcagccgcctgggccatggctcctacggagaggtcttcaaggtgcgctccaaggaggacggccggctctatgcggtaaagcgttccatgtcaccattccggggccccaaggaccgggcccgcaagttggccgaggtgggcagccacgagaaggtggggcagcacccatgctgcgtgcggctggagcaggcctgggaggagggcggcatcctgtacctgcagacggagctgtgcgggcccagcctgcagcaacactgtgaggcctggggtgccagcctgcctgaggcccaggtctggggctacctgcgggacacgctgcttgccctggcccatctgcacagccagggcctggtgcaccttgatgtcaagcctgccaacatcttcctggggccccggggccgctgcaagctgggtgacttcggactgctggtggagctgggtacagcaggagctggtgaggtccaggagggagacccccgctacatggcccccgagctgctgcagggctcctatgggacagcagcggatgtgttcagtctgggcctcaccatcctggaagtggcatgcaacatggagctgccccacggtggggagggctggcagcagctgcgccagggctacctgccccctgagttcactgccggtgagtaggtgagggcgggagggggtgctgccacgggctcctggggagatagtggctggccatggaggcactgctgggctcagggtgcagtcggtgttctgggaccccgatgtggcccttcctcatgggcaggtctgtcttccgagctgcgttctgtccttgtcatgatgctggagccagaccccaagctgcgggccacggccgaggccctgctggcactgcctgtgttgaggcagccgcgggcctggggtgtgctgtggtgcatggcagcggaggccctgagccgagggtgggccctgtggcaggccctgcttgccctgctctgctggctctggcatgggctggctcaccctgccagctggctacagcccctgggcccgccagccaccccgcctggctcaccaccctgcagtttgctcctggacagcagcctctccagcaactgggatgacgacagcctagggccttcactctcccctgaggctgtcctggcccggactgtggggagcacctccaccccccggagcaggtgcacacccaggtaagcaggtccaggggctggggtgggcagggctagcttttggatcctgagtgtcactactctctcctcccagggatgccctggacctaagtgacatcaactcagagcctcctcggggctccttcccctcctttgagcctcggaacctcctcagcctgtttgaggacaccctagacccaacctgagccccagactctgcctctgcacttttaaccttttatcctgtgtctctcccgtcgcccttgaaagctggggcccctcgggaactcccatggtcttctctgcctggccgtgtctaataaaaagtatttgaaccttgggagcacccaagcttgctcatgtggcaacatggcccttcctgtccctttattgatgtcatccagggtcttaacgcccctgaggctgagccctgctgcagaacccagcgctcctggccttgggccagcagctgaagccccatgctgtgtggagcaaagaggtttcctgagcaggcacatcccccggtgggtacctggagctgttgggagtatggcactcaaggtggagggcaggcacggcccaggggtcccaggatctgaggccgctgagctccctgtgtcagtttcctggaagaagcagctgcagcccttgtgcctgtggccagctggtacaagacgggtccacgcccccttggtccttttgtcctgaatgccttactccatagtctctgggcagagggagccagggcgggcaagcttgtggctgctgggagggctggtatgcagggcagaaagatggagatcaggaagactggccacaggcctggtgggaggaacaggatagggtgaggaggctctgggctggcggcctggcaggacttgaactctcagagcaagacgtgaccccagagtccctctctggtctaaccccacaggtcacagagggtaaagaggtcccaagagggaaaggtttccttccagctgacacagtaaaataggagcttggagggaaaaggcagggaaggaagttggagcgccacggcgtgggtggaagaggtcagtccacagggaagaacgggtgaacagggctcctgctgagacatctcatgagctggaagcatccaaggagccagccccttgcagacgagttgggaggaacacctggtgttgctaactctaggaggctgctgtgggcaggctggcatggcagctcagtcccggggacaggcgtggtgggcagcccagagcaggtcgggcacgacgccggcgtgcagctgcaggatggagcccacgctcagcaggtgcatgatctggtgggagttgccccagtagtcaaagcggccaggtccccagcgctcgggcagacgggctacatttaccagtcccccaagcagcgccagtgcgtccatgcgcaggtagcagggcagggagcctggagcccctgaacccagacccactccccgggccccaaataccagtaggcgggcagcagcctgccatccaaatgcccggagccgagcactggtggagggggcggtgagagcacgccagccggccacacccgacaacacagtgtagcccaccagggcagccgggcgc

SEQ ID NO: 53 - DNA, 2132 bp, Homo sapien
aaaaaaaaagagaataggggctcgtatgcgaatcgcctatcgagagggcaacgggggggaacaagggcggtatggccctccgcaaaaagggaagctcaaaagagaatagggttgaagcgagagaatttcgcggggcccggccacaacaacaaatgtatttataaatactataatttttttttttttttttttttttttttttttttttttttttttactaaaagtttatttcaaatctgcctccaagtccatgtgttctgaaaaggacagagggggccttggagtgcagccagatggaaggactttgaaggctgtccaagtgctgctttcagagtgcaccaagtttttattgtccctgactgtggctccctgcctgtttgtcaggcgggagcctggagcctgcacagggacagagctggtttcatccggcactccctagccctggacaccctccttgtctcgcctgccctcctgcaggccttcactctcccctgaggctgtcctggcccggactgtggggagcacctccaccccccggagcaggtgcacacccaggtaagcaggtccaggggctggggtgggcagggctagcttttggatcctgagtgtcactactctctcctcccagggatgccctggacctaagtgacatcaactcagagcctcctcggggctccttcccctcctttgagcctcggaacctcctcagcctgtttgaggacaccctagacccaacctgagccccagactctgcctctgcacttttaaccttttatcctgtgtctctcccgtcgcccttgaaagctggggcccctcgggaactcccatggtcttctctgcctggccgtgtctaataaaaagtatttgaaccttgggagcacccaagcttgctcatgtggcaacatggcccttcctgtccctttattgatgtcatccagggtcttaacgcccctgaggctgagccctgctgcagaacccagcgctcctggccttgggccagcagctgaagccccatgctgtgtggagcaaagaggtttcctgagcaggcacatcccccggtgggtacctggagctgttgggagtatggcactcaaggtggagggcaggcacggcccaggggtcccaggatctgaggccgctgagctccctgtgtcagtttcctggaagaagcagctgcagcccttgtgcctgtggccagctggtacaagacgggtccacgcccccttggtccttttgtcctgaatgccttactccatagtctctgggcagagggagccagggcgggcaagcttgtggctgctgggagggctggtatgcagggcagaaagatggagatcaggaagactggccacaggcctggtgggaggaacaggatagggtgaggaggctctgggctggcggcctggcaggacttgaactctcagagcaagacgtgaccccagagtccctctctggtctaaccccacaggtcacagagggtaaagaggtcccaagagggaaaggtttccttccagctgacacagtaaaataggagcttggagggaaaaggcagggaaggaagttggagcgccacggcgtgggtggaagaggtcagtccacagggaagaacgggtgaacagggctcctgctgagacatctcatgagctggaagcatccaaggagccagccccttgcagacgagttgggaggaacacctggtgttgctaactctaggaggctgctgtgggcaggctggcatggcagctcagtcccggggacaggcgtggtgggcagcccagagcaggtcgggcacgacgccggcgtgcagctgcaggatggagcccacgctcagcaggtgcatgatctggtgggagttgccccagtagtcaaagcggccaggtccccagcgctcgggcagacgggctacatttaccagtcccccaagcagcgccagtgcgtccatgcgcaggtagcagggcagggagcctggagcccctgaacccagacccactccccgggccccaaataccagtaggcgggcagcagcctgccatccaaatgcccggagccgagcactggtggagggggcggtgagagcacgccagccggccacacccgacaacacagtgtagcccaccagggcagccgggcgc

SEQ ID NO: 54 - DNA, 3479 bp, Homo sapien
cgaggccggtttggaatttttggcgcgagcagctccgcgcgcgttcacgggccgttccccctcacgggagtcctccgcccgggcgtccggaacagtcgacggcagactccggcccgctgagccacccgaggggtcccgtggcctccgcggacccggaatctgggccctcgcggacccgcgccccgcccagtcgccccagggcttccccacacccacggagtgaagtcagccgcggccctgcctgggaggaacttaccgtctaccgggaaaggtggccagcagatgtgtcgggcctggtgagagggtgaggcgagacggcccgatcgcccagggccccggaagctgcggaggtcacccccgcctggccttagctcagggacaccctggattcacgtgggagcccctgctcctgcctcccccgtcccaccactgaggctgttgggccaggccagtcatgctagaacggcctcctgcactggccatgcccatgcccacggagggcaccccgccacctctgagtggcacccccatcccagtcccagcctacttccgccacgcagaacctggattctccctcaagaggcccagggggctcagccggagcctcccacctccgccccctgccaagggcagcattcccatcagccgcctcttccctcctcggaccccaggctggcaccagctgcagccccggcgggtgtcattccggggcgaggcctcagagactctgcagagccctgggtatgacccaagccggccagagtccttcttccagcagagcttccagaggctcagccgcctgggccatggctcctacggagaggtcttcaaggtgcgctccaaggaggacggccggctctatgcggtaaagcgttccatgtcaccattccggggccccaaggaccgggcccgcaagttggccgaggtgggcagccacgagaaggtggggcagcacccatgctgcgtgcggctggagcaggcctgggaggagggcggcatcctgtacctgcagacggagctgtgcgggcccagcctgcagcaacactgtgaggcctggggtgccagcctgcctgaggcccaggtctggggctacctgcgggacacgctgcttgccctggcccatctgcacagccagggcctggtgcaccttgatgtcaagcctgccaacatcttcctggggccccggggccgctgcaagctgggtgacttcggactgctggtggagctgggtacagcaggagctggtgaggtccaggagggagacccccgctacatggcccccgagctgctgcagggctcctatgggacagcagcggatgtgttcagtctgggcctcaccatcctggaagtggcatgcaacatggagctgccccacggtggggagggctggcagcagctgcgccagggctacctgccccctgagttcactgccggtgagtaggtgagggcgggagggggtgctgccacgggctcctggggagatagtggctggccatggaggcactgctgggctcagggtgcagtcggtgttctgggaccccgatgtggcccttcctcatgggcaggtctgtcttccgagctgcgttctgtccttgtcatgatgctggagccagaccccaagctgcgggccacggccgaggccctgctggcactgcctgtgttgaggcagccgcgggcctggggtgtgctgtggtgcatggcagcggaggccctgagccgagggtgggccctgtggcaggccctgcttgccctgctctgctggctctggcatgggctggctcaccctgccagctggctacagcccctgggcccgccagccaccccgcctggctcaccaccctgcagtttgctcctggacagcagcctctccagcaactgggatgacgacagcctagggccttcactctcccctgaggctgtcctggcccggactgtggggagcacctccaccccccggagcaggtgcacacccaggggatgccctggacctaagtgacatcaactcagagcctcctcggggctccttcccctcctttgagcctcggaacctcctcagcctgtttgaggacaccctagacccaacctgagccccagactctgcctctgcacttttaaccttttatcctgtgtctctcccgtcgcccttgaaagctggggcccctcgggaactcccatggtcttctctgcctggccgtgtctaataaaaagtatttgaaccttgggagcacccaagcttgctcatgtggcaacatggcccttcctgtccctttattgatgtcatccagggtcttaacgcccctgaggctgagccctgctgcagaacccagcgctcctggccttgggccagcagctgaagccccatgctgtgtggagcaaagaggtttcctgagcaggcacatcccccggtgggtacctggagctgttgggagtatggcactcaaggtggagggcaggcacggcccaggggtcccaggatctgaggccgctgagctccctgtgtcagtttcctggaagaagcagctgcagcccttgtgcctgtggccagctggtacaagacgggtccacgcccccttggtccttttgtcctgaatgccttactccatagtctctgggcagagggagccagggcgggcaagcttgtggctgctgggagggctggtatgcagggcagaaagatggagatcaggaagactggccacaggcctggtgggaggaacaggatagggtgaggaggctctgggctggcggcctggcaggacttgaactctcagagcaagacgtgaccccagagtccctctctggtctaaccccacaggtcacagagggtaaagaggtcccaagagggaaaggtttccttccagctgacacagtaaaataggagcttggagggaaaaggcagggaaggaagttggagcgccacggcgtgggtggaagaggtcagtccacagggaagaacgggtgaacagggctcctgctgagacatctcatgagctggaagcatccaaggagccagccccttgcagacgagttgggaggaacacctggtgttgctaactctaggaggctgctgtgggcaggctggcatggcagctcagtcccggggacaggcgtggtgggcagcccagagcaggtcgggcacgacgccggcgtgcagctgcaggatggagcccacgctcagcaggtgcatgatctggtgggagttgccccagtagtcaaagcggccaggtccccagcgctcgggcagacgggctacatttaccagtcccccaagcagcgccagtgcgtccatgcgcaggtagcagggcagggagcctggagcccctgaacccagacccactccccgggccccaaataccagtaggcgggcagcagcctgccatccaaatgcccggagccgagcactggtggagggggcggtgagagcacgccagccggccacacccgacaacacagtgtagcccaccagggcagccgggcgc

SEQ ID NO: 55 - DNA, 2101 bp, Homo sapien
ccctgggaacaagtccttggtccctggggcctggtgtcttgagtgagaggctgtaattaggaaaccacacgctcagggcagacagctcttggggactctgccgttagccccttccttacaaacacatcacctcatccctcggggcacttgatagcagacaagaagttccagaaaggcttacatttactaaaagtttatttcaaatctgcctccaagtccatgtgttctgaaaaggacagagggggccttggagtgcagccagatggaaggactttgaaggctgtccaagtgctgctttcagagtgcaccaagtttttattgtccctgactgtggctccctgcctgtttgtcaggcgggagcctggagcctgcacagggacagagctggtttcatccggcactccctagccctggacaccctccttgtctcgcctgccctcctgcaggccttcactctcccctgaggctgtcctggcccggactgtggggagcacctccaccccccggagcaggtgcacacccaggtaagcaggtccaggggctggggtgggcagggctagcttttggatcctgagtgtcactactctctcctcccagggatgccctggacctaagtgacatcaactcagagcctcctcggggctccttcccctcctttgagcctcggaacctcctcagcctgtttgaggacaccctagacccaacctgagccccagactctgcctctgcacttttaaccttttatcctgtgtctctcccgtcgcccttgaaagctggggcccctcgggaactcccatggtcttctctgcctggccgtgtctaataaaaagtatttgaaccttgggagcacccaagcttgctcatgtggcaacatggcccttcctgtccctttattgatgtcatccagggtcttaacgcccctgaggctgagccctgctgcagaacccagcgctcctggccttgggccagcagctgaagccccatgctgtgtggagcaaagaggtttcctgagcaggcacatcccccggtgggtacctggagctgttgggagtatggcactcaaggtggagggcaggcacggcccaggggtcccaggatctgaggccgctgagctccctgtgtcagtttcctggaagaagcagctgcagcccttgtgcctgtggccagctggtacaagacgggtccacgcccccttggtccttttgtcctgaatgccttactccatagtctctgggcagagggagccagggcgggcaagcttgtggctgctgggagggctggtatgcagggcagaaagatggagatcaggaagactggccacaggcctggtgggaggaacaggatagggtgaggaggctctgggctggcggcctggcaggacttgaactctcagagcaagacgtgaccccagagtccctctctggtctaaccccacaggtcacagagggtaaagaggtcccaagagggaaaggtttccttccagctgacacagtaaaataggagcttggagggaaaaggcagggaaggaagttggagcgccacggcgtgggtggaagaggtcagtccacagggaagaacgggtgaacagggctcctgctgagacatctcatgagctggaagcatccaaggagccagccccttgcagacgagttgggaggaacacctggtgttgctaactctaggaggctgctgtgggcaggctggcatggcagctcagtcccggggacaggcgtggtgggcagcccagagcaggtcgggcacgacgccggcgtgcagctgcaggatggagcccacgctcagcaggtgcatgatctggtgggagttgccccagtagtcaaagcggccaggtccccagcgctcgggcagacgggctacatttaccagtcccccaagcagcgccagtgcgtccatgcgcaggtagcagggcagggagcctggagcccctgaacccagacccactccccgggccccaaataccagtaggcgggcagcagcctgccatccaaatgcccggagccgagcactggtggagggggcggtgagagcacgccagccggccacacccgacaacacagtgtagcccaccagggcagccgggcgc

SEQ ID NO: 56 - DNA, 2060 bp, Homo sapien
aaaaaaaaagagaataggggctcgtatgcgaatcgcctatcgagagggcaacgggggggaacaagggcggtatggccctccgcaaaaagggaagctcaaaagagaatagggttgaagcgagagaatttcgcggggcccggccacaacaacaaatgtatttataaatactataatttttttttttttttttttttttttttttttttttttttttttactaaaagtttatttcaaatctgcctccaagtccatgtgttctgaaaaggacagagggggccttggagtgcagccagatggaaggactttgaaggctgtccaagtgctgctttcagagtgcaccaagtttttattgtccctgactgtggctccctgcctgtttgtcaggcgggagcctggagcctgcacagggacagagctggtttcatccggcactccctagccctggacaccctccttgtctcgcctgccctcctgcaggccttcactctcccctgaggctgtcctggcccggactgtggggagcacctccaccccccggagcaggtgcacacccaggggatgccctggacctaagtgacatcaactcagagcctcctcggggctccttcccctcctttgagcctcggaacctcctcagcctgtttgaggacaccctagacccaacctgagccccagactctgcctctgcacttttaaccttttatcctgtgtctctcccgtcgcccttgaaagctggggcccctcgggaactcccatggtcttctctgcctggccgtgtctaataaaaagtatttgaaccttgggagcacccaagcttgctcatgtggcaacatggcccttcctgtccctttattgatgtcatccagggtcttaacgcccctgaggctgagccctgctgcagaacccagcgctcctggccttgggccagcagctgaagccccatgctgtgtggagcaaagaggtttcctgagcaggcacatcccccggtgggtacctggagctgttgggagtatggcactcaaggtggagggcaggcacggcccaggggtcccaggatctgaggccgctgagctccctgtgtcagtttcctggaagaagcagctgcagcccttgtgcctgtggccagctggtacaagacgggtccacgcccccttggtccttttgtcctgaatgccttactccatagtctctgggcagagggagccagggcgggcaagcttgtggctgctgggagggctggtatgcagggcagaaagatggagatcaggaagactggccacaggcctggtgggaggaacaggatagggtgaggaggctctgggctggcggcctggcaggacttgaactctcagagcaagacgtgaccccagagtccctctctggtctaaccccacaggtcacagagggtaaagaggtcccaagagggaaaggtttccttccagctgacacagtaaaataggagcttggagggaaaaggcagggaaggaagttggagcgccacggcgtgggtggaagaggtcagtccacagggaagaacgggtgaacagggctcctgctgagacatctcatgagctggaagcatccaaggagccagccccttgcagacgagttgggaggaacacctggtgttgctaactctaggaggctgctgtgggcaggctggcatggcagctcagtcccggggacaggcgtggtgggcagcccagagcaggtcgggcacgacgccggcgtgcagctgcaggatggagcccacgctcagcaggtgcatgatctggtgggagttgccccagtagtcaaagcggccaggtccccagcgctcgggcagacgggctacatttaccagtcccccaagcagcgccagtgcgtccatgcgcaggtagcagggcagggagcctggagcccctgaacccagacccactccccgggccccaaataccagtaggcgggcagcagcctgccatccaaatgcccggagccgagcactggtggagggggcggtgagagcacgccagccggccacacccgacaacacagtgtagcccaccagggcagccgggcgc

SEQ ID NO: 57 - DNA, 2251 bp, Homo sapien
ggggggaaggggttggaggtggtggtagggggtgtgtggcagggtgagtggggggggtgtggtgtgtggtatgggggggtgttctggtggggttcttggatgtggggtgataccgtggggtgtatgtggggaggtgtatggagtgtgctttatggggatgtcgggtttttttgcagcgtttgtgtcagagagattgggttgagaggtggaagggtgtgggggcagaggggggggtgggtgggggggtgttgtggggcgcgggagtagggaggggggggaggttgtgtgtggggtggtggggggtggggtgttgtggtgtgtgacagtgttactttactaaaagtttatttcaaatctgcctccaagtccatgtgttctgaaaaggacagagggggccttggagtgcagccagatggaaggactttgaaggctgtccaagtgctgctttcagagtgcaccaagtttttattgtccctgactgtggctccctgcctgtttgtcaggcgggagcctggagcctgcacagggacagagctggtttcatccggcactccctagccctggacaccctccttgtctcgcctgccctcctgcaggccttcactctcccctgaggctgtcctggcccggactgtggggagcacctccaccccccggagcaggtgcacacccaggtaagcaggtccaggggctggggtgggcagggctagcttttggatcctgagtgtcactactctctcctcccagggatgccctggacctaagtgacatcaactcagagcctcctcggggctccttcccctcctttgagcctcggaacctcctcagcctgtttgaggacaccctagacccaacctgagccccagactctgcctctgcacttttaaccttttatcctgtgtctctcccgtcgcccttgaaagctggggcccctcgggaactcccatggtcttctctgcctggccgtgtctaataaaaagtatttgaaccttgggagcacccaagcttgctcatgtggcaacatggcccttcctgtccctttattgatgtcatccagggtcttaacgcccctgaggctgagccctgctgcagaacccagcgctcctggccttgggccagcagctgaagccccatgctgtgtggagcaaagaggtttcctgagcaggcacatcccccggtgggtacctggagctgttgggagtatggcactcaaggtggagggcaggcacggcccaggggtcccaggatctgaggccgctgagctccctgtgtcagtttcctggaagaagcagctgcagcccttgtgcctgtggccagctggtacaagacgggtccacgcccccttggtccttttgtcctgaatgccttactccatagtctctgggcagagggagccagggcgggcaagcttgtggctgctgggagggctggtatgcagggcagaaagatggagatcaggaagactggccacaggcctggtgggaggaacaggatagggtgaggaggctctgggctggcggcctggcaggacttgaactctcagagcaagacgtgaccccagagtccctctctggtctaaccccacaggtcacagagggtaaagaggtcccaagagggaaaggtttccttccagctgacacagtaaaataggagcttggagggaaaaggcagggaaggaagttggagcgccacggcgtgggtggaagaggtcagtccacagggaagaacgggtgaacagggctcctgctgagacatctcatgagctggaagcatccaaggagccagccccttgcagacgagttgggaggaacacctggtgttgctaactctaggaggctgctgtgggcaggctggcatggcagctcagtcccggggacaggcgtggtgggcagcccagagcaggtcgggcacgacgccggcgtgcagctgcaggatggagcccacgctcagcaggtgcatgatctggtgggagttgccccagtagtcaaagcggccaggtccccagcgctcgggcagacgggctacatttaccagtcccccaagcagcgccagtgcgtccatgcgcaggtagcagggcagggagcctggagcccctgaacccagacccactccccgggccccaaataccagtaggcgggcagcagcctgccatccaaatgcccggagccgagcactggtggagggggcggtgagagcacgccagccggccacacccgacaacacagtgtagcccaccagggcagccgggcgc

SEQ ID NO: 58 - DNA, 2309 bp, Homo sapien
gtaatacctgccagcagtaactgtggtgcctgtccatcagggcactgggaggactcaccactgtggcttgtgggctccctgggcacagagcccatattccatgatgtccccatcctgcccagggttcatgatcaggcctgttggggtgtcccttccccctgcttccgcccctccctgactgatgaagacagcagccctctcccacccacctccaagaggcagccctggactgggtctgtgtcccagggccaaccctgcccctttctgtccccatcccgtccctgccagtctgggcctcaccatcctggaagtggcatgcaacatggagctgccccacggtggggagggctggcagcagctgcgccagggctacctgccccctgagttcactgccggtctgtcttccgagctgcgttctgtccttgtcatgatgctggagccagaccccaagctgcgggccacggccgaggccctgctggcactgcctgtgttgaggcagccgcgggcctggggtgtgctgtggtgcatggcagcggaggccctgagccgagggtgggccctgtggcaggccctgcttgccctgctctgctggctctggcatgggctggctcaccctgccagctggctacagcccctgggcccgccagccaccccgcctggctcaccaccctgcagtttgctcctggacagcagcctctccagcaactgggatgacgacagcctagggccttcactctcccctgaggctgtcctggcccggactgtggggagcacctccaccccccggagcaggtgcacacccaggggatgccctggacctaagtgacatcaactcagagcctcctcggggctccttcccctcctttgagcctcggaacctcctcagcctgtttgaggacaccctagacccaacctgagccccagactctgcctctgcacttttaaccttttatcctgtgtctctcccgtcgcccttgaaagctggggcccctcgggaactcccatggtcttctctgcctggccgtgtctaataaaaagtatttgaaccttgggagcacccaagcttgctcatgtggcaacatggcccttcctgtccctttattgatgtcatccagggtcttaacgcccctgaggctgagccctgctgcagaacccagcgctcctggccttgggccagcagctgaagccccatgctgtgtggagcaaagaggtttcctgagcaggcacatcccccggtgggtacctggagctgttgggagtatggcactcaaggtggagggcaggcacggcccaggggtcccaggatctgaggccgctgagctccctgtgtcagtttcctggaagaagcagctgcagcccttgtgcctgtggccagctggtacaagacgggtccacgcccccttggtccttttgtcctgaatgccttactccatagtctctgggcagagggagccagggcgggcaagcttgtggctgctgggagggctggtatgcagggcagaaagatggagatcaggaagactggccacaggcctggtgggaggaacaggatagggtgaggaggctctgggctggcggcctggcaggacttgaactctcagagcaagacgtgaccccagagtccctctctggtctaaccccacaggtcacagagggtaaagaggtcccaagagggaaaggtttccttccagctgacacagtaaaataggagcttggagggaaaaggcagggaaggaagttggagcgccacggcgtgggtggaagaggtcagtccacagggaagaacgggtgaacagggctcctgctgagacatctcatgagctggaagcatccaaggagccagccccttgcagacgagttgggaggaacacctggtgttgctaactctaggaggctgctgtgggcaggctggcatggcagctcagtcccggggacaggcgtggtgggcagcccagagcaggtcgggcacgacgccggcgtgcagctgcaggatggagcccacgctcagcaggtgcatgatctggtgggagttgccccagtagtcaaagcggccaggtccccagcgctcgggcagacgggctacatttaccagtcccccaagcagcgccagtgcgtccatgcgcaggtagcagggcagggagcctggagcccctgaacccagacccactccccgggccccaaataccagtaggcgggcagcagcctgccatccaaatgcccggagccgagcactggtggagggggcggtgagagcacgccagccggccacacccgacaacacagtgtagcccaccagggcagccgggcgc

SEQ ID NO: 59 - DNA, 2323 bp, Homo sapien
agtggcgcgcaggcttttgtaacgttcccagcgccgcgtttgaattcggggaggagcggagcggtgcggaggctctgctcggatcgaggtctgcagcgcagcttcgggagcatgagtgctgcagtgactgcagggaagctggcacgggcaccggccgaccctgggaaagccggggtccccggagttgcagctcccggagctccggcggcggctccaccggcgaaagagatcccggaggtcctagtggacccacgcagccggcggcgctatgtgcggggccgctttttgggcaagggcggctttgccaagtgcttcgagatctcggacgcggacaccaaggaggtgttcgcgggcaagattgtgcctaagtctctgctgctcaagccgcaccagagggagaagatgtccatggaaatatccattcaccgcagcctcgcccaccagcacgtcgtaggattccacggctttttcgaggacaacgacttcgtgttcgtggtgttggagctctgccgccggaggtctctcctggagctgcacaagaggaggaaagccctgactgagcctgaggcccgatactacctacggcaaattgtgcttggctgccagtacctgcaccgaaaccgagttattcatcgagacctcaagctgggcaaccttttcctgaatgaagatctggaggtgaaaataggggattttggactggcaaccaaagtcgaatatgacggggagaggaagaagaccctgtgtgggactcctaattacatagctcccgaggtgctgagcaagaaagggcacagtttcgaggtggatgtgtggtccattgggtgtatcatgtataccttgttagtgggcaaaccaccttttgagacttcttgcctaaaagagacctacctccggatcaagaagaatgaatacagtattcccaagcacatcaaccccgtggccgcctccctcatccagaagatgcttcagacagatcccactgcccgcccaaccattaacgagctgcttaatgacgagttctttacttctggctatatccctgcccgtctccccatcacctgcctgaccattccaccaaggttttcgattgctcccagcagcctggaccccagcaaccggaagcccctcacagtcctcaataaaggcttggagaaccccctgcctgagcgtccccgggaaaaagaagaaccagtggttcgagagacaggtgaggtggtcgactgccacctcagtgacatgctgcagcagctgcacagtgtcaatgcctccaagccctcggagcgtgggctggtcaggcaagaggaggctgaggatcctgcctgcatccccatcttctgggtcagcaagtgggtggactattcggacaagtacggccttgggtatcagctctgtgataacagcgtgggggtgctcttcaatgactcaacacgcctcatcctctacaatgatggtgacagcctgcagtacatagagcgtgacggcactgagtcctacctcaccgtgagttcccatcccaactccttgatgaagaagatcaccctccttaaatatttccgcaattacatgagcgagcacttgctgaaggcaggtgccaacatcacgccgcgcgaaggtgatgagctcgcccggctgccctacctacggacctggttccgcacccgcagcgccatcatcctgcacctcagcaacggcagcgtgcagatcaacttcttccaggtgagctggaggtcaccaggcgcaggagagagctggggtaggctccgcatgcctggcagtggcccatgtgggttgaatgtggagtgagcggctcaggatcacaccaagctcatcttgtgcccactgatggcagccgtgacctacatcgacgagaagcgggacttccgcacataccgcctgagtctcctggaggagtacggctgctgcaaggagctggccagccggctccgctacgcccgcactatggtggacaagctgctgagctcacgctcggccagcaaccgtctcaaggcctcctaatagctgccctcccctccggactggtgccctcctcactcccacctgcatctggggcccatactggttggctcccgcggtgccatgtctgcagtgtgccccccagccccggtggctgggcagagctgcatcatccttgcaggtgggggttgctgtataagttatttttgtacatgttcgggtgtgggttctacagccttgtccccctccccctcaaccccaccatatgaattgtacagaatatttctattgaattcggaactgtcctttccttggctttatgcacattaaacagatgtgaatattc

SEQ ID NO: 60 - DNA, 566 bp, Homo sapien
tggcgtgcgccccccgactcgcctcgccccgagacccggaaagtatattctagctaccgatcacaccaagctcatcttgtgcccactgatggcagccgtgacctacatcgacgagaagcgggacttccgcacataccgcctgagtctcctggaggagtacggctgctgcaaggagctggccagccggctccgctacgcccgcactatggtggacaagctgctgagctcacgctcggccagcaaccgtctcaaggcctcctaatagctgccctcccctccggactggtgccctcctcactcccacctgcatctggggcccatactggttggctcccgcggtgccatgtctgcagtgtgccccccagccccggtggctgggcagagctgcatcatccttgcaggtgggggttgctgtataagttatttttgtacatgttcgggtgtgggttctacagccttgtccccctccccctcaaccccaccatatgaattgtacagaatatttctattgaattcggaactgtcctttccttggctttatgcacattaaacagatgtgaatattc

SEQ ID NO: 61 - DNA, 3270 bp, Homo sapien
agtggcgcgcaggcttttgtaacgttcccagcgccgcgtttgaattcggggaggagcggagcggtgcggaggctctgctcggatcgaggtctgcagcgcagcttcgggagcatgagtgctgcagtgactgcagggaagctggcacgggcaccggccgaccctgggaaagccggggtccccggagttgcagctcccggagctccggcggcggctccaccggcgaaagagatcccggaggtcctagtggacccacgcagccggcggcgctatgtgcggggccgctttttgggcaagggcggctttgccaagtgcttcgagatctcggacgcggacaccaaggaggtgttcgcgggcaagattgtgcctaagtctctgctgctcaagccgcaccagagggagaagatgtccatggaaatatccattcaccgcagcctcgcccaccagcacgtcgtaggattccacggctttttcgaggacaacgacttcgtgttcgtggtgttggagctctgccgccggaggtctctcctggagctgcacaagaggaggaaagccctgactgagcctgaggcccgatactacctacggcaaattgtgcttggctgccagtacctgcaccgaaaccgagttattcatcgagacctcaagctgggcaaccttttcctgaatgaagatctggaggtgaaaataggggattttggactggcaaccaaagtcgaatatgacggggagaggaagaagaccctgtgtgggactcctaattacatagctcccgaggtgctgagcaagaaagggcacagtttcgaggtggatgtgtggtccattgggtgtatcatgtataccttgttagtgggcaaaccaccttttgagacttcttgcctaaaagagacctacctccggatcaagaagaatgaatacagtattcccaagcacatcaaccccgtggccgcctccctcatccagaagatgcttcagacagatcccactgcccgcccaaccattaacgagctgcttaatgacgagttctttacttctggctatatccctgcccgtctccccatcacctgcctgaccattccaccaaggttttcgattgctcccagcagcctggaccccagcaaccggaagcccctcacagtcctcaataaaggcttggagaaccccctgcctgagcgtccccgggaaaaagaagaaccagtggttcgagagacaggtgaggtggtcgactgccacctcagtgacatgctgcagcagctgcacagtgtcaatgcctccaagccctcggagcgtgggctggtcaggcaaggtgggtactgcggggccctgggcggggcaggattgcttggggcatctggaaaaggcaggaggaggcttggccaacaaagcactggtgacttgttcaggccctgtctgcataggaccattggtttccccatttcctgatatccaaggccctgcttccgtggctcctgccgccttttctgatccgtcttttttactctagcacctcgatgtgccaccttcatacgctgtttcttttgctcagtaagttcctattgtatcttcaagacccttgaaataacagacccagatgtactgcagcctcagggctttctccctggtcctggcacgaaagcacttcttccagacaccacatggctcacactgtggcctccttcaagtgtctgctccagtgtcagctctgtgagcatctccctggcccctctgctggtgcttctcatcctcttgcccactgcatagttctccataacacttctcacccaacatagtccaacatgtccttctttgtttattggatttaaattaaggggtttgttgcatgcactgaacgtaacattttgatgtgtttgcaactggcttctgtcttcacagtttcttaattactccaaactggaaaactagatgcctctgactcttaccatgatagaagtcactgatattttgcccatacttaaattgattagtctttgcccctacaaccacagtgtaagctccgtggaggctggggttttgtctgttgctcactgaacctgcaacagtgcctggcacggtaggccttcagtaaatgggtcagtggaatgaaggagtgagtggaacttggtgcgctgtgctgagactttctctgcagagatatctgtgctgctgcttgtctgagcctgctggcagcagaggccctgctttgctcttctctggggccctaggcctctcaactgagcccaggtggggtgcccagcaggcttccctgttccctggtgtgggccacatgtgtggagcagaggggaagaggctggtcctgaccaactaactgtctgtctgtttctgtctcagaggaggctgaggatcctgcctgcatccccatcttctgggtcagcaagtgggtggactattcggacaagtacggccttgggtatcagctctgtgataacagcgtgggggtgctcttcaatgactcaacacgcctcatcctctacaatgatggtgacagcctgcagtacatagagcgtgacggcactgagtcctacctcaccgtgagttcccatcccaactccttgatgaagaagatcaccctccttaaatatttccgcaattacatgagcgagcacttgctgaaggcaggtgccaacatcacgccgcgcgaaggtgatgagctcgcccggctgccctacctacggacctggttccgcacccgcagcgccatcatcctgcacctcagcaacggcagcgtgcagatcaacttcttccaggatcacaccaagctcatcttgtgcccactgatggcagccgtgacctacatcgacgagaagcgggacttccgcacataccgcctgagtctcctggaggagtacggctgctgcaaggagctggccagccggctccgctacgcccgcactatggtggacaagctgctgagctcacgctcggccagcaaccgtctcaaggcctcctaatagctgccctcccctccggactggtgccctcctcactcccacctgcatctggggcccatactggttggctcccgcggtgccatgtctgcagtgtgccccccagccccggtggctgggcagagctgcatcatccttgcaggtgggggttgctgtataagttatttttgtacatgttcgggtgtgggttctacagccttgtccccctccccctcaaccccaccatatgaattgtacagaatatttctattgaattcggaactgtcctttccttggctttatgcacattaaacagatgtgaatattc

SEQ ID NO: 62 - DNA, 556 bp, Homo sapien
cccctcgcccttattacgaattatgtttggatgaaaggtatcagtaccgatcacaccaagctcatcttgtgcccactgatggcagccgtgacctacatcgacgagaagcgggacttccgcacataccgcctgagtctcctggaggagtacggctgctgcaaggagctggccagccggctccgctacgcccgcactatggtggacaagctgctgagctcacgctcggccagcaaccgtctcaaggcctcctaatagctgccctcccctccggactggtgccctcctcactcccacctgcatctggggcccatactggttggctcccgcggtgccatgtctgcagtgtgccccccagccccggtggctgggcagagctgcatcatccttgcaggtgggggttgctgtataagttatttttgtacatgttcgggtgtgggttctacagccttgtccccctccccctcaaccccaccatatgaattgtacagaatatttctattgaattcggaactgtcctttccttggctttatgcacattaaacagatgtgaatattc

SEQ ID NO: 63 - DNA, 1018 bp, Homo sapien
atgctcggctgtggattccgtacttgaggtgttgaggcttcccacagcggggaagtttgcgcgtttcctccccaattgtgtctccgggcgctttctgcgttgccctcccatgatgtgtctgtgccccaaaaggtttgttgcacatatgtttgccgcccctcgtttgcgctatatgtgttgctctgggtttacagccggcatgttccttcatgagcgccatcagtcgcgcccccccgtgttgttgcttggcacggtccaccgtggggttctatgatcgctggaaatccttggggtgctgttggttccctagggttttctgagccctttctgtgagatttaaagggcttttccgtacgacaatattgggccgtacatctagttcgttgccttagagagatgtgaaaagttttgccgattctgtctagctccttcttggggccccggcggcgaggcacccgtaggtatcagtgcatgtcccggtatatccggtcgtctcccctgttgtgttacgacatatagcccagttgagggaacgctcacgatttgcactcccccatgcgatcctccgactgattttctctttctgttcgtcccgttttcccctggtctgtgacacggtatgcccctttctcacgtatgcacggcggactccggccactgggtccagagcacccctgcttcatggggaaaccctggtttgtcgttcccacaccaaactgagttcggaccacataacaccttccactttttcaccccacgagcgtcagcagccaacttttgtggccatacgcttttcatagagaagtatcgaagtttgcgttcatcgtccacttcaatgagtttctggcagcccgtggctgggaaggagatgttcagcttcatcttgaagcagctgtacgcctccgagccttgtccccctccccctcaaccccaccatatgaattgtacagaatatttctattgaattcggaactgtcctttccttggctttatgcacattaaacagatgtgaatattc

SEQ ID NO: 64 - DNA, 3764 bp, Homo sapien
agtggcgcgcaggcttttgtaacgttcccagcgccgcgtttgaattcggggaggagcggagcggtgcggaggctctgctcggatcgaggtctgcagcgcagcttcgggagcatgagtgctgcagtgactgcagggaagctggcacgggcaccggccgaccctgggaaagccggggtccccggagttgcagctcccggagctccggcggcggctccaccggcgaaagagatcccggaggtcctagtggacccacgcagccggcggcgctatgtgcggggccgctttttgggcaagggcggctttgccaagtgcttcgagatctcggacgcggacaccaaggaggtgttcgcgggcaagattgtgcctaagtctctgctgctcaagccgcaccagagggagaagatgtccatggaaatatccattcaccgcagcctcgcccaccagcacgtcgtaggattccacggctttttcgaggacaacgacttcgtgttcgtggtgttggagctctgccgccggaggtctctcctggagctgcacaagaggaggaaagccctgactgagcctgaggcccgatactacctacggcaaattgtgcttggctgccagtacctgcaccgaaaccgagttattcatcgagacctcaagctgggcaaccttttcctgaatgaagatctggaggtgaaaataggggattttggactggcaaccaaagtcgaatatgacggggagaggaagaagaccctgtgtgggactcctaattacatagctcccgaggtgctgagcaagaaagggcacagtttcgaggtggatgtgtggtccattgggtgtatcatgtataccttgttagtgggcaaaccaccttttgagacttcttgcctaaaagagacctacctccggatcaagaagaatgaatacagtattcccaagcacatcaaccccgtggccgcctccctcatccagaagatgcttcagacagatcccactgcccgcccaaccattaacgagctgcttaatgacgagttctttacttctggctatatccctgcccgtctccccatcacctgcctgaccattccaccaaggttttcgattgctcccagcagcctggaccccagcaaccggaagcccctcacagtcctcaataaaggcttggagaaccccctgcctgagcgtccccgggaaaaagaagaaccagtggttcgagagacaggtgaggtggtcgactgccacctcagtgacatgctgcagcagctgcacagtgtcaatgcctccaagccctcggagcgtgggctggtcaggcaaggtgggtactgcggggccctgggcggggcaggattgcttggggcatctggaaaaggcaggaggaggcttggccaacaaagcactggtgacttgttcaggccctgtctgcataggaccattggtttccccatttcctgatatccaaggccctgcttccgtggctcctgccgccttttctgatccgtcttttttactctagcacctcgatgtgccaccttcatacgctgtttcttttgctcagtaagttcctattgtatcttcaagacccttgaaataacagacccagatgtactgcagcctcagggctttctccctggtcctggcacgaaagcacttcttccagacaccacatggctcacactgtggcctccttcaagtgtctgctccagtgtcagctctgtgagcatctccctggcccctctgctggtgcttctcatcctcttgcccactgcatagttctccataacacttctcacccaacatagtccaacatgtccttctttgtttattggatttaaattaaggggtttgttgcatgcactgaacgtaacattttgatgtgtttgcaactggcttctgtcttcacagtttcttaattactccaaactggaaaactagatgcctctgactcttaccatgatagaagtcactgatattttgcccatacttaaattgattagtctttgcccctacaaccacagtgtaagctccgtggaggctggggttttgtctgttgctcactgaacctgcaacagtgcctggcacggtaggccttcagtaaatgggtcagtggaatgaaggagtgagtggaacttggtgcgctgtgctgagactttctctgcagagatatctgtgctgctgcttgtctgagcctgctggcagcagaggccctgctttgctcttctctggggccctaggcctctcaactgagcccaggtggggtgcccagcaggcttccctgttccctggtgtgggccacatgtgtggagcagaggggaagaggctggtcctgaccaactaactgtctgtctgtttctgtctcagaggaggctgaggatcctgcctgcatccccatcttctgggtcagcaagtgggtggactattcggacaagtacggccttggtaggtttcttccagaacaggtgggtgactcaggcacagccaggtgaccttttcagttgttacagactctggcctttttgagctcccaggtactgttctcagtgccctcctctctccatcccaggcctcccagttccagctcccagtgctccctgactccccagctttttttttttttccagagacagggtcctgctctgtagcccaggctggagtgcagtggcacaatcatggctcactgcagcctcaaactcccaggcccctaagtagctgtgactacaggcgtgcaccattatgctcagctaatttttaaaatattttgtagagatggggtctcattacgttgcccaggctggtctcaaactcctgggctcaaacaatcctcctccctcagcctcccaaagtgctggaatcacaggcatgtgccaccacgcccggtcccactccccactttctattccccctttctgagacctctctccaccgatccctagggtatcagctctgtgataacagcgtgggggtgctcttcaatgactcaacacgcctcatcctctacaatgatggtgacagcctgcagtacatagagcgtgacggcactgagtcctacctcaccgtgagttcccatcccaactccttgatgaagaagatcaccctccttaaatatttccgcaattacatgagcgagcacttgctgaaggcaggtgccaacatcacgccgcgcgaaggtgatgagctcgcccggctgccctacctacggacctggttccgcacccgcagcgccatcatcctgcacctcagcaacggcagcgtgcagatcaacttcttccaggatcacaccaagctcatcttgtgcccactgatggcagccgtgacctacatcgacgagaagcgggacttccgcacataccgcctgagtctcctggaggagtacggctgctgcaaggagctggccagccggctccgctacgcccgcactatggtggacaagctgctgagctcacgctcggccagcaaccgtctcaaggcctcctaatagctgccctcccctccggactggtgccctcctcactcccacctgcatctggggcccatactggttggctcccgcggtgccatgtctgcagtgtgccccccagccccggtggctgggcagagctgcatcatccttgcaggtgggggttgctgtataagttatttttgtacatgttcgggtgtgggttctacagccttgtccccctccccctcaaccccaccatatgaattgtacagaatatttctattgaattcggaactgtcctttccttggctttatgcacattaaacagatgtgaatattc

SEQ ID NO: 65 - DNA, 549 bp, Homo sapien
  misc_feature (33)..(33): n=a, c, g or t
gggcactgcaaccccccacagaggagagcctcnggtaaactgatcacaccaagctcatcttgtgcccactgatggcagccgtgacctacatcgacgagaagcgggacttccgcacataccgcctgagtctcctggaggagtacggctgctgcaaggagctggccagccggctccgctacgcccgcactatggtggacaagctgctgagctcacgctcggccagcaaccgtctcaaggcctcctaatagctgccctcccctccggactggtgccctcctcactcccacctgcatctggggcccatactggttggctcccgcggtgccatgtctgcagtgtgccccccagccccggtggctgggcagagctgcatcatccttgcaggtgggggttgctgtataagttatttttgtacatgttcgggtgtgggttctacagccttgtccccctccccctcaaccccaccatatgaattgtacagaatatttctattgaattcggaactgtcctttccttggctttatgcacattaaacagatgtgaatattc

SEQ ID NO: 66 - DNA, 2065 bp, Homo sapien
ggagccagacttcgggccttccgggggagatacgagtcaggaaagggatctggtgctggggactcggagcttccggagtggggctgagagaggacccccaggtaaggggggaagctagtaggagaaggggtgctgcgaatggttgtggacagtgttaaggcagggtccagatgccgctgtgctggagaaggaatggggtgggggcatagggaaggagagaaacccaccaagacccctctttcatcccttgggagtccagagtccagtcctgtgcttcctttgcctggtaaccctctcccttccccaccggcctcaatccacctccccatccctcctgccctctccttcccacccacatctctcctggagctgcacaagaggaggaaagccctgactgagcctgaggcccgatactacctacggcaaattgtgcttggctgccagtacctgcaccgaaaccgagttattcatcgagacctcaagctgggcaaccttttcctgaatgaagatctggaggtgaaaataggggattttggactggcaaccaaagtcgaatatgacggggagaggaagaagaccctgtgtgggactcctaattacatagctcccgaggtgctgagcaagaaagggcacagtttcgaggtggatgtgtggtccattgggtgtatcatgtataccttgttagtgggcaaaccaccttttgagacttcttgcctaaaagagacctacctccggatcaagaagaatgaatacagtattcccaagcacatcaaccccgtggccgcctccctcatccagaagatgcttcagacagatcccactgcccgcccaaccattaacgagctgcttaatgacgagttctttacttctggctatatccctgcccgtctccccatcacctgcctgaccattccaccaaggttttcgattgctcccagcagcctggaccccagcaaccggaagcccctcacagtcctcaataaaggcttggagaaccccctgcctgagcgtccccgggaaaaagaagaaccagtggttcgagagacaggtgaggtggtcgactgccacctcagtgacatgctgcagcagctgcacagtgtcaatgcctccaagccctcggagcgtgggctggtcaggcaagaggaggctgaggatcctgcctgcatccccatcttctgggtcagcaagtgggtggactattcggacaagtacggccttgggtatcagctctgtgataacagcgtgggggtgctcttcaatgactcaacacgcctcatcctctacaatgatggtgacagcctgcagtacatagagcgtgacggcactgagtcctacctcaccgtgagttcccatcccaactccttgatgaagaagatcaccctccttaaatatttccgcaattacatgagcgagcacttgctgaaggcaggtgccaacatcacgccgcgcgaaggtgatgagctcgcccggctgccctacctacggacctggttccgcacccgcagcgccatcatcctgcacctcagcaacggcagcgtgcagatcaacttcttccaggatcacaccaagctcatcttgtgcccactgatggcagccgtgacctacatcgacgagaagcgggacttccgcacataccgcctgagtctcctggaggagtacggctgctgcaaggagctggccagccggctccgctacgcccgcactatggtggacaagctgctgagctcacgctcggccagcaaccgtctcaaggcctcctaatagctgccctcccctccggactggtgccctcctcactcccacctgcatctggggcccatactggttggctcccgcggtgccatgtctgcagtgtgccccccagccccggtggctgggcagagctgcatcatccttgcaggtgggggttgctgtataagttatttttgtacatgttcgggtgtgggttctacagccttgtccccctccccctcaaccccaccatatgaattgtacagaatatttctattgaattcggaactgtcctttccttggctttatgcacattaaacagatgtgaatattc

SEQ ID NO: 67 - DNA, 1020 bp, Homo sapien
cggcgcgcgccgtgggaaccttgtacaagcagcatggctgcaggttgctcagaggcgccgcggccagcggcggcttctgatgggtctctggtagggcaggctggcgtcctgccttgcctagagttgccgacttatgccgctgcttgtgcgctggtgaacagtcgctactcatgcctggtggccgggccgcaccaaaggcacatcgcgctgtcgccccgctaccttaacaggaaacgcaccggcattcgagaacagcttgatgcggagctccttcgctattctgagagccttttaggtgtccctatgcatatgataacatcaaagttgtgggagagcttggagatatttatgatgatcaaggacacattcatcttaacattgaagccgatttgttattttctgccctgaaccagggcagaagcttatggtatgtgtatcacttttttctagctccctttgtataattctataattatgtaacttggaacattttaagagataatatataccttgggactcaaataaagcacgactgaacacagacagcagccgcctcgccatgaagctgctgatggtcctcatgctggcggccctcctcctgcactgctatgcagattctggctgcaaactcctggaggacatggttgaaaagaccatcaattccgacatatctatacctgaatacaaagagcttcttcaagagttcatagacagtgatgccgctgcagaggctatggggaaattcaagcagtgtttcctcaaccagtcacatagaactctgaaaaactttggactgatgatgcatacagtgtacgacagcatttggtgtaatatgaagagtaattaactttacccaaggcgtttggctcagagggctacagactatggccagaactcatctgttgattgctagaaaccacttttctttcttgtgttgtctttttatgtggaaactgctagacaactgttgaaacctcaaattcatttccatttcaataaactaactgcaaatcactaaaa

SEQ ID NO: 68 - DNA, 3072 bp, Homo sapien
atgaaattcagcactgggatcaggggagtgtctgatttgcaaaaggaaagtgcaaagacagctcctcccttctgaggaaacgaaaccaacagcagtccaagctcagtcagcagaagagataaaagcaaacaggtctgggaggcagttctgttgccactctctctcctgtcaatgatggatctcagaaataccccagccaaatctctggacaagttcattgaagactatctcttgccagacacgtgtttccgcatgcaaatcaaccatgccattgacatcatctgtgggttcctgaaggaaaggtgcttccgaggtagctcctaccctgtgtgtgtgtccaaggtggtaaagggtggctcctcaggcaagggcaccaccctcagaggccgatctgacgctgacctggttgtcttcctcagtcctctcaccacttttcaggatcagttaaatcgccggggagagttcatccaggaaattaggagacagctggaagcctgtcaaagagagagagcattttccgtgaagtttgaggtccaggctccacgctggggcaacccccgtgcgctcagcttcgtactgagttcgctccagctcggggagggggtggagttcgatgtgctgcctgcctttgatgccctgggtcagttgactggcggctataaacctaacccccaaatctatgtcaagctcatcgaggagtgcaccgacctgcagaaagagggcgagttctccacctgcttcacagaactacagagagacttcctgaaaagggttggaggcagctggcacaagaggctgaggcctggctgaattacccatgctttaagaattgggatgggtccccagtgagctcctggattctgctggtgagacctcctgcttcctccctgccattcatccctgcccctctccatgaagcttgagacatatagctggagaccattctttccaaagaacttacctcttgccaaaggccatttatattcatatagtgacaggctgtgctccatattttacagtcattttggtcacaatcgagggtttctggaattttcacatcccttgtccagaattcattcccctaagagtaataataaataatctctaacaccatttattgactgtctgcttcgggctcaggttctgtcctaagccctttaatatgcactctctcattaaatagtcacaacaatcccatgaggcatttttaaaaattttttattattttagattcagagggcacatgtgccatttgttacacagctatattgtgtaatggtggggtttgggcctctattgatcctgtcgcccaaatagtgaacagagtacccaaaaagaattttttcaacctttgcctttctcccttcctcctccctgttggagtccctagtgtctattgttcccatctttagcagatgttaagtatttgattttctgtttctgggttaattcacttcggataatggcctccagctgcaaccatgatttcattctttcttatggctgcataatactccatggtgtagatataccacactttctttatccagttcacactgatgggcacttaagttgattccatgactttgctattgtgaatcgtactgcgataaacatacgagtgccggtgtcttttgatagaatgatttctttacctttgggtagataccgagtagtgggattgctgggttgaatggacattctacttttagttatttgaaaagtcccatgaggcatgttttctatcattcccatcttacagatgagacaaaggctcagagaggtgaggtcacttgctcaaggacatcagctaacaagtggtggaaatggaattcaagctcagtggactctaaagccagtgctcatgtcactgtgctaaacagcctgccttgtcacatccccacctctcatctgaccaatgggagactctgagcagctgagtgacttgggttgtcacacagctaaacaggggcaaaggacccagtcttggatctttccacctccaagcaggaatctgtctgattccaggggattgatgatgttgcagatggctaggaagcagactccaggatggaatttagtatgcaggatgttctgggggagagccactggaaccagcactcagggaaaggggggaagaaaggataggaaggaagcatgaaagagaatagggagaagtgaacagggatgcagagcgaatgccagtttcagccaactccaaggacagccctggagctggaatggcctttagagctgccccatggtgacagaggtggccaggcttctatacccctacgtggatcactcactgtgcttgggcaccttgggaaagggcatggctttgagcaaaaggctctctgcagctgaggcaacccctaaaagggctgacggctgaagtctgtctgctgaccactgtcccagcagctggggcttgttagtccttcctcaaagggggatccagatggcatgtcacagtgtctaccgtaaatgctcactgaatccagctgcaatgcaggaagactccctgatgtgatcatgtgtctcaccctttcaagctgctgaaagcaacagtgcagacgatgagaccgacgatcccaggaggtatcagaaatatggttacattggaacacatgagtaccctcatttctctcatagacccagcacactccaggcagcatccaccccacaggcagaagaggactggacctgcaccatcctctgaatgccagtgcatcttgggggaaagggctccagtgttatctggaccagttccttcattttcaggtgggactcttgatccagagaagacaaagctcctcagtgagctggtgtataatccaggacagaacccaggtctcctgactcctggccttctatgccctctatcctatcatagataacattctccacagcctcacttcattccacctattctctgaaaatattccctgagagagaacagagagatttagataagagaatgaaattccagccttgactttcttctgtgcacctgatgggagggtaatgtctaatgtattatcaataacaataaaaataaagcaaatacca

SEQ ID NO: 69 - DNA, 2516 bp, Homo sapien
acgaaacccaggcctgtgatcctggacccggcggaccctacaggaaacttgggtggtggagacccaaagggttggaggcagcttgcaccacaaggtgaaggctgggttgaattccccaaatctatgtcaagctcatcgaggagtgcaccgacctgcagaaagagggcgagttctccacctgcttcacagaactacagagagacttcctgaaaagggttggaggcagctggcacaagaggctgaggcctggctgaattacccatgctttaagaattgggatgggtccccagtgagctcctggattctgctggtgagacctcctgcttcctccctgccattcatccctgcccctctccatgaagcttgagacatatagctggagaccattctttccaaagaacttacctcttgccaaaggccatttatattcatatagtgacaggctgtgctccatattttacagtcattttggtcacaatcgagggtttctggaattttcacatcccttgtccagaattcattcccctaagagtaataataaataatctctaacaccatttattgactgtctgcttcgggctcaggttctgtcctaagccctttaatatgcactctctcattaaatagtcacaacaatcccatgaggcatttttaaaaattttttattattttagattcagagggcacatgtgccatttgttacacagctatattgtgtaatggtggggtttgggcctctattgatcctgtcgcccaaatagtgaacagagtacccaaaaagaattttttcaacctttgcctttctcccttcctcctccctgttggagtccctagtgtctattgttcccatctttagcagatgttaagtatttgattttctgtttctgggttaattcacttcggataatggcctccagctgcaaccatgatttcattctttcttatggctgcataatactccatggtgtagatataccacactttctttatccagttcacactgatgggcacttaagttgattccatgactttgctattgtgaatcgtactgcgataaacatacgagtgccggtgtcttttgatagaatgatttctttacctttgggtagataccgagtagtgggattgctgggttgaatggacattctacttttagttatttgaaaagtcccatgaggcatgttttctatcattcccatcttacagatgagacaaaggctcagagaggtgaggtcacttgctcaaggacatcagctaacaagtggtggaaatggaattcaagctcagtggactctaaagccagtgctcatgtcactgtgctaaacagcctgccttgtcacatccccacctctcatctgaccaatgggagactctgagcagctgagtgacttgggttgtcacacagctaaacaggggcaaaggacccagtcttggatctttccacctccaagcaggaatctgtctgattccaggggattgatgatgttgcagatggctaggaagcagactccaggatggaatttagtatgcaggatgttctgggggagagccactggaaccagcactcagggaaaggggggaagaaaggataggaaggaagcatgaaagagaatagggagaagtgaacagggatgcagagcgaatgccagtttcagccaactccaaggacagccctggagctggaatggcctttagagctgccccatggtgacagaggtggccaggcttctatacccctacgtggatcactcactgtgcttgggcaccttgggaaagggcatggctttgagcaaaaggctctctgcagctgaggcaacccctaaaagggctgacggctgaagtctgtctgctgaccactgtcccagcagctggggcttgttagtccttcctcaaagggggatccagatggcatgtcacagtgtctaccgtaaatgctcactgaatccagctgcaatgcaggaagactccctgatgtgatcatgtgtctcaccctttcaagctgctgaaagcaacagtgcagacgatgagaccgacgatcccaggaggtatcagaaatatggttacattggaacacatgagtaccctcatttctctcatagacccagcacactccaggcagcatccaccccacaggcagaagaggactggacctgcaccatcctctgaatgccagtgcatcttgggggaaagggctccagtgttatctggaccagttccttcattttcaggtgggactcttgatccagagaagacaaagctcctcagtgagctggtgtataatccaggacagaacccaggtctcctgactcctggccttctatgccctctatcctatcatagataacattctccacagcctcacttcattccacctattctctgaaaatattccctgagagagaacagagagatttagataagagaatgaaattccagccttgactttcttctgtgcacctgatgggagggtaatgtctaatgtattatcaataacaataaaaataaagcaaatacca

SEQ ID NO: 70 - DNA, 327 bp, Homo sapien
gcggccgcctactactactactactgctcgaattcaagcttctaacgatgtacggggaagtcccctcccatcccccacgcagctccaccccagtcccaagccaccagctgtctgctcctggtgggaggtggcctcctcagcccctcctctctgacctttaacctcactctcaccttgcaccgtgcaccaacccttcacccctcctggaaagcaggcctgatggcttcccactggcctccaccacctgaccagagtgttctcttcagaggactggctcctttcccagtgtccttaaaataaagaaatgaaaatgcttgttggcacatt

SEQ ID NO: 71 - DNA, 3829 bp, Homo sapien
gcggccgcctactactactaaattcgcggccgcgtcgacaaaatgggttgaagccgcccttccccacaagcaccctgtgcacaggcaatgcccagccccattattttctggactccgtggccaagcatgcttaggacacacagccacatacttctgggcagtgtcatctggcaacttgctgtcatgtcagtgtggtcaagcattgtagacctctatgaaccaaatatgcttcaggcttgggttgagcacaggagagggaggagggaaaggtcactggggctgggagtgcctacttccctctgtgagtgtcaccccagtccacccagtaccatacctttctctctctggacccacttccttttgctgccggctcctccccattgaataacagccaagttgctttggtttctttttctttgttaagtcgttccctctacaaaggacttcctagtgggtgtgaaaggcagcggtggccacagaggcggcggagagatggccttcagcggttcccaggctccctacctgagtccagctgtccccttttctgggactattcaaggaggtctccaggacggacttcagatcactgtcaatgggaccgttctcagctccagtggaaccaggtttgctgtgaactttcagactggcttcagtggaaatgacattgccttccacttcaaccctcggtttgaagatggagggtacgtggtgtgcaacacgaggcagaacggaagctgggggcccgaggagaggaagacacacatgcctttccagaaggggatgccctttgacctctgcttcctggtgcagagctcagatttcaaggtgatggtgaacgggatcctcttcgtgcagtacttccaccgcgtgcccttccaccgtgtggacaccatctccgtcaatggctctgtgcagctgtcctacatcagcttccagaacccccgcacagtccctgttcagcctgccttctccacggtgccgttctcccagcctgtctgtttcccacccaggcccagggggcgcagacaaaaagtgagttcaacacagaggccctgggtggccgagcagacagtaggaaggaccgagggtctgagaggctggccccagccagcaggccactcagggcctacaggccgcatcttgcccacccaagagttccctgtctctgtccgctgggcacccagagctggggacctgggggtcaccctggattcttcactccctcttctttacgtctctccaaggcacgaacgtgtctccctcctgaagccaccgatgtggtccaggcctctgggattcctcaccatgacgacaggggtccagttccccaccccctacacccaaccactgccacagtgaccttcttataagcaaatgtgatcacaccctctccctgcttaaaaatcttcacagcccccagcccttcaaataaagcccaaattctccagcagggtatatgaattcctccccagtctgccccaatccacgtccctgcctcacccccaacccacgaagctcacgcagcctctgcagctcactcaaggccctcttgggccaccatgcttttgcatatgctgtccctggtcccggaagcaccctctgccagcctgcctcgagcacatgcctaattgcccttccatgctctgcctaagtgccgctcctctgggagtcctccccgcctggaatattgttggacgctcccctggtgtccccacagagtctgtatgtatctgtgccatgccagttcacagcaccccattgtaactgtatttgcgtgtctgtccccgttactccacccccatgtccctatgcccatgaggccccagagggccaggactgtggcttgttcatttgcactgtgcctggcactcagtagggactcagtgaatgaatgtggaatgtggttcacacagccagggagaatgggataccagccagggcaagaacagtctactgggtggggcaggatccaggacaaggaggtgagcagcccttcctccggccactcaagtagtggggactgggaggaggggcgctttgtctacgcagtcttcttatggctcatcaccgtacagacagggcacctgcctcctgccacgctgacttcaggactggtcgagccccagggaacatttgcagggcagcccaactttggccctggccctggcgctggccctggctctggggaggatagaaagtgtgctggatacagtcagacagaactggctgccactttggatttgatcccttccaccttggcaagcttgggcaagttgcttaatctttctgagcctcgttgcctcactagggacacaggagctgaggctgcttcccttgttggaaagcactgaagcccaggaatcgacccacaataggccttcaacaaataccacttctcaccttatgggtgaaatatggcactggaagtaatgctcttcgctgtgggagctacagaaagcaatgaggtctctatcaaacccagtctcctctctctcgagaggaaccagtggggataccctaccccccaaccccaaagccctgtacacctgggggtaaaaatctgggtgccacgggctcaggaaggcttgcttgggagcaagagggaggtgggtgtgtccggggaggcatttctgagcacaagagcctccctggagttttgccaccatctcctcccattctgtggtgcccgcgataaccaccattctgactctcctcacccctccagcctcccggcgtgtggcctgccaacccggctcccattacccagacagtcatccacacagtgcagagcgcccctggacagatgttctctactcccgccatcccacctatgatgtacccccaccccgcctatccgatgcctttcatcaccaccattctgggagggctgtacccatccaagtccatcctcctgtcaggcactgtcctgcccagtgctcagaggttccacatcaacctgtgctctgggaaccacatcgccttccacctgaacccccgttttgatgagaatgctgtggtccgcaacacccagatcgacaactcctgggggtctgaggagcgaagtctgccccgaaaaatgcccttcgtccgtggccagagcttctcagtgtggatcttgtgtgaagctcactgcctcaaggtggccgtggatggtcagcacctgtttgaatactaccatcgcctgaggaacctgcccaccatcaacagactggaagtggggggcgacatccagctgacccatgtgcagacataggcggcttcctggccctggggccgggggctggggtgtggggcagtctgggtcctctcatcatccccacttcccaggcccagcctttccaaccctgcctgggatctgggctttaatgcagaggccatgtccttgtctggtcctgcttctggctacagccaccctggaacggagaaggcagctgacggggattgccttcctcagccgcagcagcacctggggctccagctgctggaatcctaccatcccaggaggcaggcacagccagggagaggggaggagtgggcagtgaagatgaagccccatgctcagtcccctcccatcccccacgcagctccaccccagtcccaagccaccagctgtctgctcctggtgggaggtggcctcctcagcccctcctctctgacctttaacctcactctcaccttgcaccgtgcaccaacccttcacccctcctggaaagcaggcctgatggcttcccactggcctccaccacctgaccagagtgttctcttcagaggactggctcctttcccagtgtccttaaaataaagaaatgaaaatgcttgttggcacatt

SEQ ID NO: 72 - DNA, 3617 bp, Homo sapien
gcggccgcctactactactaaattcgcggccgcgtcgacaaaatgggttgaagccgcccttccccacaagcaccctgtgcacaggcaatgcccagccccattattttctggactccgtggccaagcatgcttaggacacacagccacatacttctgggcagtgtcatctggcaacttgctgtcatgtcagtgtggtcaagcattgtagacctctatgaaccaaatatgcttcaggcttgggttgagcacaggagagggaggagggaaaggtcactggggctgggagtgcctacttccctctgtgagtgtcaccccagtccacccagtaccatacctttctctctctggacccacttccttttgctgccggctcctccccattgaataacagccaagttgctttggtttctttttctttgttaagtcgttccctctacaaaggacttcctagtgggtgtgaaaggcagcggtggccacagaggcggcggagagatggccttcagcggttcccaggctccctacctgagtccagctgtccccttttctgggactattcaaggaggtctccaggacggacttcagatcactgtcaatgggaccgttctcagctccagtggaaccaggtttgctgtgaactttcagactggcttcagtggaaatgacattgccttccacttcaaccctcggtttgaagatggagggtacgtggtgtgcaacacgaggcagaacggaagctgggggcccgaggagaggaagacacacatgcctttccagaaggggatgccctttgacctctgcttcctggtgcagagctcagatttcaaggtgatggtgaacgggatcctcttcgtgcagtacttccaccgcgtgcccttccaccgtgtggacaccatctccgtcaatggctctgtgcagctgtcctacatcagcttccagaacccccgcacagtccctgttcagcctgccttctccacggtgccgttctcccagcctgtctgtttcccacccaggcccagggggcgcagacaaaaagcacgaacgtgtctccctcctgaagccaccgatgtggtccaggcctctgggattcctcaccatgacgacaggggtccagttccccaccccctacacccaaccactgccacagtgaccttcttataagcaaatgtgatcacaccctctccctgcttaaaaatcttcacagcccccagcccttcaaataaagcccaaattctccagcagggtatatgaattcctccccagtctgccccaatccacgtccctgcctcacccccaacccacgaagctcacgcagcctctgcagctcactcaaggccctcttgggccaccatgcttttgcatatgctgtccctggtcccggaagcaccctctgccagcctgcctcgagcacatgcctaattgcccttccatgctctgcctaagtgccgctcctctgggagtcctccccgcctggaatattgttggacgctcccctggtgtccccacagagtctgtatgtatctgtgccatgccagttcacagcaccccattgtaactgtatttgcgtgtctgtccccgttactccacccccatgtccctatgcccatgaggccccagagggccaggactgtggcttgttcatttgcactgtgcctggcactcagtagggactcagtgaatgaatgtggaatgtggttcacacagccagggagaatgggataccagccagggcaagaacagtctactgggtggggcaggatccaggacaaggaggtgagcagcccttcctccggccactcaagtagtggggactgggaggaggggcgctttgtctacgcagtcttcttatggctcatcaccgtacagacagggcacctgcctcctgccacgctgacttcaggactggtcgagccccagggaacatttgcagggcagcccaactttggccctggccctggcgctggccctggctctggggaggatagaaagtgtgctggatacagtcagacagaactggctgccactttggatttgatcccttccaccttggcaagcttgggcaagttgcttaatctttctgagcctcgttgcctcactagggacacaggagctgaggctgcttcccttgttggaaagcactgaagcccaggaatcgacccacaataggccttcaacaaataccacttctcaccttatgggtgaaatatggcactggaagtaatgctcttcgctgtgggagctacagaaagcaatgaggtctctatcaaacccagtctcctctctctcgagaggaaccagtggggataccctaccccccaaccccaaagccctgtacacctgggggtaaaaatctgggtgccacgggctcaggaaggcttgcttgggagcaagagggaggtgggtgtgtccggggaggcatttctgagcacaagagcctccctggagttttgccaccatctcctcccattctgtggtgcccgcgataaccaccattctgactctcctcacccctccagcctcccggcgtgtggcctgccaacccggctcccattacccagacagtcatccacacagtgcagagcgcccctggacagatgttctctactcccgccatcccacctatgatgtacccccaccccgcctatccgatgcctttcatcaccaccattctgggagggctgtacccatccaagtccatcctcctgtcaggcactgtcctgcccagtgctcagaggttccacatcaacctgtgctctgggaaccacatcgccttccacctgaacccccgttttgatgagaatgctgtggtccgcaacacccagatcgacaactcctgggggtctgaggagcgaagtctgccccgaaaaatgcccttcgtccgtggccagagcttctcagtgtggatcttgtgtgaagctcactgcctcaaggtggccgtggatggtcagcacctgtttgaatactaccatcgcctgaggaacctgcccaccatcaacagactggaagtggggggcgacatccagctgacccatgtgcagacataggcggcttcctggccctggggccgggggctggggtgtggggcagtctgggtcctctcatcatccccacttcccaggcccagcctttccaaccctgcctgggatctgggctttaatgcagaggccatgtccttgtctggtcctgcttctggctacagccaccctggaacggagaaggcagctgacggggattgccttcctcagccgcagcagcacctggggctccagctgctggaatcctaccatcccaggaggcaggcacagccagggagaggggaggagtgggcagtgaagatgaagccccatgctcagtcccctcccatcccccacgcagctccaccccagtcccaagccaccagctgtctgctcctggtgggaggtggcctcctcagcccctcctctctgacctttaacctcactctcaccttgcaccgtgcaccaacccttcacccctcctggaaagcaggcctgatggcttcccactggcctccaccacctgaccagagtgttctcttcagaggactggctcctttcccagtgtccttaaaataaagaaatgaaaatgcttgttggcacatt

SEQ ID NO: 73 - DNA, 4340 bp, Homo sapien
gcggccgcctactactactaaattcgcggccgcgtcgacaaaatgggttgaagccgcccttccccacaagcaccctgtgcacaggcaatgcccagccccattattttctggactccgtggccaagcatgcttaggacacacagccacatacttctgggcagtgtcatctggcaacttgctgtcatgtcagtgtggtcaagcattgtagacctctatgaaccaaatatgcttcaggcttgggttgagcacaggagagggaggagggaaaggtcactggggctgggagtgcctacttccctctgtgagtgtcaccccagtccacccagtaccatacctttctctctctggacccacttccttttgctgccggctcctccccattgaataacagccaagttgctttggtttctttttctttgttaagtcgttccctctacaaaggacttcctagtgggtgtgaaaggcagcggtggccacagaggcggcggagagatggccttcagcggttcccaggctccctacctgagtccagctgtccccttttctgggactattcaaggaggtctccaggacggacttcagatcactgtcaatgggaccgttctcagctccagtggaaccaggtttgctgtgaactttcagactggcttcagtggaaatgacattgccttccacttcaaccctcggtttgaagatggagggtacgtggtgtgcaacacgaggcagaacggaagctgggggcccgaggagaggaagacacacatgcctttccagaaggggatgccctttgacctctgcttcctggtgcagagctcagatttcaaggtgatggtgaacgggatcctcttcgtgcagtacttccaccgcgtgcccttccaccgtgtggacaccatctccgtcaatggctctgtgcagctgtcctacatcagcttccagaacccccgcacagtccctgttcagcctgccttctccacggtgccgttctcccagcctgtctgtttcccacccaggcccagggggcgcagacaaaaagtgagttcaacacagaggccctgggtggccgagcagacagtaggaaggaccgagggtctgagaggctggccccagccagcaggccactcagggcctacaggccgcatcttgcccacccaagagttccctgtctctgtccgctgggcacccagagctggggacctgggggtcaccctggattcttcactccctcttctttacgtctctccaaggcacgaacgtgtctccctcctgaagccaccgatgtggtccaggcctctgggattcctcaccatgacgacaggggtccagttccccaccccctacacccaaccactgccacagtgaccttcttataagcaaatgtgatcacaccctctccctgcttaaaaatcttcacagcccccagcccttcaaataaagcccaaattctccagcagggtatatgaattcctccccagtctgccccaatccacgtccctgcctcacccccaacccacgaagctcacgcagcctctgcagctcactcaaggccctcttgggccaccatgcttttgcatatgctgtccctggtcccggaagcaccctctgccagcctgcctcgagcacatgcctaattgcccttccatgctctgcctaagtgccgctcctctgggagtcctccccgcctggaatattgttggacgctcccctggtgtccccacagagtctgtatgtatctgtgccatgccagttcacagcaccccattgtaactgtatttgcgtgtctgtccccgttactccacccccatgtccctatgcccatgaggccccagagggccaggactgtggcttgttcatttgcactgtgcctggcactcagtagggactcagtgaatgaatgtggaatgtggttcacacagccagggagaatgggataccagccagggcaagaacagtctactgggtggggcaggatccaggacaaggaggtgagcagcccttcctccggccactcaagtagtggggactgggaggaggggcgctttgtctacgcagtcttcttatggctcatcaccgtacagacagggcacctgcctcctgccacgctgacttcaggactggtcgagccccagggaacatttgcagggcagcccaactttggccctggccctggcgctggccctggctctggggaggatagaaagtgtgctggatacagtcagacagaactggctgccactttggatttgatcccttccaccttggcaagcttgggcaagttgcttaatctttctgagcctcgttgcctcactagggacacaggagctgaggctgcttcccttgttggaaagcactgaagcccaggaatcgacccacaataggccttcaacaaataccacttctcaccttatgggtgaaatatggcactggaagtaatgctcttcgctgtgggagctacagaaagcaatgaggtctctatcaaacccagtctcctctctctcgagaggaaccagtggggataccctaccccccaaccccaaagccctgtacacctgggggtaaaaatctgggtgccacgggctcaggaaggcttgcttgggagcaagagggaggtgggtgtgtccggggaggcatttctgagcacaagagcctccctggagttttgccaccatctcctcccattctgtggtgcccgcgataaccaccattctgactctcctcacccctccagcctcccggcgtgtggcctgccaacccggctcccattgtaagtctcttgctttctttttggatcgtcctcattttggcttttctgggctcatggaggaggcagggccaggcattgggcctctcccattgggagtggggagggcacagaccagacccttgaccatctgcccggcctggtgaggttgggggttggatgtgggggttggatgaaacaacctgagttgccaccccgtgggcagccacggaagaccatgccccacattcacttctgtcacctgcaaagggaggctaggctgagagacgtttccccgagaggaaagatgggccagagccaccagcgtccccatctgtcttctccagggttctaacctttgcccctcgctcatccccttgagagaagagacacctgggcccaccctctgtggggtctgtggggccattgggcttgttacgccccctggagggtgcctgccgtgtggcgccctctggtgggagctggtggttttcacacgtgagagcctgggtgagacctggtttctttcttccagacccagacagtcatccacacagtgcagagcgcccctggacagatgttctctactcccgccatcccacctatgatgtacccccaccccgcctatccgatgcctttcatcaccaccattctgggagggctgtacccatccaagtccatcctcctgtcaggcactgtcctgcccagtgctcagaggttccacatcaacctgtgctctgggaaccacatcgccttccacctgaacccccgttttgatgagaatgctgtggtccgcaacacccagatcgacaactcctgggggtctgaggagcgaagtctgccccgaaaaatgcccttcgtccgtggccagagcttctcagtgtggatcttgtgtgaagctcactgcctcaaggtggccgtggatggtcagcacctgtttgaatactaccatcgcctgaggaacctgcccaccatcaacagactggaagtggggggcgacatccagctgacccatgtgcagacataggcggcttcctggccctggggccgggggctggggtgtggggcagtctgggtcctctcatcatccccacttcccaggcccagcctttccaaccctgcctgggatctgggctttaatgcagaggccatgtccttgtctggtcctgcttctggctacagccaccctggaacggagaaggcagctgacggggattgccttcctcagccgcagcagcacctggggctccagctgctggaatcctaccatcccaggaggcaggcacagccagggagaggggaggagtgggcagtgaagatgaagccccatgctcagtcccctcccatcccccacgcagctccaccccagtcccaagccaccagctgtctgctcctggtgggaggtggcctcctcagcccctcctctctgacctttaacctcactctcaccttgcaccgtgcaccaacccttcacccctcctggaaagcaggcctgatggcttcccactggcctccaccacctgaccagagtgttctcttcagaggactggctcctttcccagtgtccttaaaataaagaaatgaaaatgcttgttggcacatt

SEQ ID NO: 74 - DNA, 1877 bp, Homo sapien
gcggccgcctactactactaaattcgcggccgcgtcgacaaaatgggttgaagccgcccttccccacaagcaccctgtgcacaggcaatgcccagccccattattttctggactccgtggccaagcatgcttaggacacacagccacatacttctgggcagtgtcatctggcaacttgctgtcatgtcagtgtggtcaagcattgtagacctctatgaaccaaatatgcttcaggcttgggttgagcacaggagagggaggagggaaaggtcactggggctgggagtgcctacttccctctgtgagtgtcaccccagtccacccagtaccatacctttctctctctggacccacttccttttgctgccggctcctccccattgaataacagccaagttgctttggtttctttttctttgttaagtcgttccctctacaaaggacttcctagtgggtgtgaaaggcagcggtggccacagaggcggcggagagatggccttcagcggttcccaggctccctacctgagtccagctgtccccttttctgggactattcaaggaggtctccaggacggacttcagatcactgtcaatgggaccgttctcagctccagtggaaccaggtttgctgtgaactttcagactggcttcagtggaaatgacattgccttccacttcaaccctcggtttgaagatggagggtacgtggtgtgcaacacgaggcagaacggaagctgggggcccgaggagaggaagacacacatgcctttccagaaggggatgccctttgacctctgcttcctggtgcagagctcagatttcaaggtgatggtgaacgggatcctcttcgtgcagtacttccaccgcgtgcccttccaccgtgtggacaccatctccgtcaatggctctgtgcagctgtcctacatcagcttccagcctcccggcgtgtggcctgccaacccggctcccattacccagacagtcatccacacagtgcagagcgcccctggacagatgttctctactcccgccatcccacctatgatgtacccccaccccgcctatccgatgcctttcatcaccaccattctgggagggctgtacccatccaagtccatcctcctgtcaggcactgtcctgcccagtgctcagaggtgtggatcttgtgtgaagctcactgcctcaaggtggccgtggatggtcagcacctgtttgaatactaccatcgcctgaggaacctgcccaccatcaacagactggaagtggggggcgacatccagctgacccatgtgcagacataggcggcttcctggccctggggccgggggctggggtgtggggcagtctgggtcctctcatcatccccacttcccaggcccagcctttccaaccctgcctgggatctgggctttaatgcagaggccatgtccttgtctggtcctgcttctggctacagccaccctggaacggagaaggcagctgacggggattgccttcctcagccgcagcagcacctggggctccagctgctggaatcctaccatcccaggaggcaggcacagccagggagaggggaggagtgggcagtgaagatgaagccccatgctcagtcccctcccatcccccacgcagctccaccccagtcccaagccaccagctgtctgctcctggtgggaggtggcctcctcagcccctcctctctgacctttaacctcactctcaccttgcaccgtgcaccaacccttcacccctcctggaaagcaggcctgatggcttcccactggcctccaccacctgaccagagtgttctcttcagaggactggctcctttcccagtgtccttaaaataaagaaatgaaaatgcttgttggcacatt

SEQ ID NO: 75 - DNA, 1255 bp, Homo sapien
gcggccgcctactactactaaattcgcggccgcgtcgacaaaatgggttgaagccgcccttccccacaagcaccctgtgcacaggcaatgcccagccccattattttctggactccgtggccaagcatgcttaggacacacagccacatacttctgggcagtgtcatctggcaacttgctgtcatgtcagtgtggtcaagcattgtagacctctatgaaccaaatatgcttcaggcttgggttgagcacaggagagggaggagggaaaggtcactggggctgggagtgcctacttccctctgtgagtgtcaccccagtccacccagtaccatacctttctctctctggacccacttccttttgctgccggctcctccccattgaataacagccaagttgctttggtttctttttctttgttaagtcgttccctctacaaaggacttcctagtgggtgtgaaaggcagcggtggccacagaggcgcgaagtctgccccgaaaaatgcccttcgtccgtggccagagcttctcagtgtggatcttgtgtgaagctcactgcctcaaggtggccgtggatggtcagcacctgtttgaatactaccatcgcctgaggaacctgcccaccatcaacagactggaagtggggggcgacatccagctgacccatgtgcagacataggcggcttcctggccctggggccgggggctggggtgtggggcagtctgggtcctctcatcatccccacttcccaggcccagcctttccaaccctgcctgggatctgggctttaatgcagaggccatgtccttgtctggtcctgcttctggctacagccaccctggaacggagaaggcagctgacggggattgccttcctcagccgcagcagcacctggggctccagctgctggaatcctaccatcccaggaggcaggcacagccagggagaggggaggagtgggcagtgaagatgaagccccatgctcagtcccctcccatcccccacgcagctccaccccagtcccaagccaccagctgtctgctcctggtgggaggtggcctcctcagcccctcctctctgacctttaacctcactctcaccttgcaccgtgcaccaacccttcacccctcctggaaagcaggcctgatggcttcccactggcctccaccacctgaccagagtgttctcttcagaggactggctcctttcccagtgtccttaaaataaagaaatgaaaatgcttgttggcacatt

SEQ ID NO: 76 - DNA, 947 bp, Homo sapien
gcggccgcctactactactaaattcgcggccgcgtcgacaaaatgggttgaagccgcccttccccacaagcaccctgtgcacaggcaatgcccagccccattattttctggactccgtggccaagcatgcttaggacacacagccacatacttctgggcagtgtcatctggcaacttgctgtcatgtcagtgtggtcaagcattgtagacctctatgaaccaaatatgcttcaggcttgggttgagcacaggagagggaggagggaaaggtcactggggctgggagtgcctacttccctctgtgagtgtcaccccagtccacccagtaccatacctttctctctctggacccacttccttttgctgccggctcctccccattgaataacagccaagttgctttggtttctttttctttgttaagtcgttccctctacaaaggacttcctagtgggtgtgaaaggcagcggtggccacagaggcggcggagagatggccttcagcgttcccaggcccagcctttccaaccctgcctgggatctgggctttaatgcagaggccatgtccttgtctggtcctgcttctggctacagccaccctggaacggagaaggcagctgacggggattgccttcctcagccgcagcagcacctggggctccagctgctggaatcctacagtcccctcccatcccccacgcagctccaccccagtcccaagccaccagctgtctgctcctggtgggaggtggcctcctcagcccctcctctctgacctttaacctcactctcaccttgcaccgtgcaccaacccttcacccctcctggaaagcaggcctgatggcttcccactggcctccaccacctgaccagagtgttctcttcagaggactggctcctttcccagtgtccttaaaataaagaaatgaaaatgcttgttggcacatt

SEQ ID NO: 77 - DNA, 374 bp, Homo sapien
gcgcgagacttgctggacaggacacctgtgttctgggcctgccgcggaggacatctggtcatcctcaaacagctgcttaaccagggagcccgggtcaatgcccgggacaaggtgaggtgcacggtgctttgggggcctgtcgggaacacgggagcagacgctgttcctggagaggtggcctcctcagcccctcctctctgacctttaacctcactctcaccttgcaccgtgcaccaacccttcacccctcctggaaagcaggcctgatggcttcccactggcctccaccacctgaccagagtgttctcttcagaggactggctcctttcccagtgtccttaaaataaagaaatgaaaatgcttgttggcacatt

SEQ ID NO: 78 - DNA, 2196 bp, Homo sapien
gatgcaggtcagaggtcctgcgaactcctcctgctggactggagttggcctatgccctgagcagaaacatgggggctcccatgaccatgacgtatatgcatcatcatcagtagcgagcagtaggcttatgtagacatgaggaagattggcagtagccggggaatggtttctgcataccctcgacagctagagtcattaatccgcttagcagaagcccatgctaaagtaagattgtctaacaaagttgaagccattgatgtggaagaggccaaacgcctccatcgggaagctctgaagcagtctgcaactgatccccggactggcatcgtggacatatctattcttactacggggatgagtgccacctctcgtaaacggaaagaagaattagctgaagcattgaaaaagcttattttatctaagggcaaaacaccagctctaaaataccagcaactttttgaagatattcggggacaatctgacatagcaattactaaagatatgtttgaagaagcactgcgtgccctggcagatgatgatttcctgacagtgactgggaagaccgtgcgcttgctctgaagccttgtgagcaaggaaggctccctgcatgtcctgcttgctgcacgccacatgggtgtggtctgcatctcagttggccgccatcagtgtaaatagagcttaaagtcatggtttggctgcataaaaattttctaacttgggttcaatatttgtagtgaagtatctgttttcatttttttcacgttataaataaaaatactatgctggccgggcgcggtggctcacacctgtaatcccagcactttgggaggccaatgtgggtggatcatgaggtcaggagttcaagaccagcctagccaagatggtgaaaccccgtctctagtaaagataacaaaaaattagctgggcttgatggcatgcgcctgtaatcccagctactcgggaggttgaggcaggagaatcgcttaaacccaggcggcagaggttgcagtgagccaagatcgcgccactgcactccagcctcagcaatagagtgagactgtctcaaaaaaaaaaaaaaaaaaaacctgccaattttcaaacataccgtagagattattttcaggtgccattttatagtatagcagcagggcttttactctgtgtatgcacagatgcagtctggggcatggtttgtgtgctggactttctcatggccatcatcagtatgcttatggatttgatgacaggcatagcctgggcatatcacctcattggtaaagggctagagcctttcttttttatggcacttctttttttgagatagggtcttactctgtcaccctggctagagtacactggtacaatcacggctcaatgtaggcttaacctcctgggctcaggtgtatgtcactatgcccggctactttttgtattttttggtagagacggcttcgccacgttgcccaggctgcaagcgatatgcctaggctcaagcgatctgcccacctcaacttccggaagtgctgagattacaggtgtgagccactgcacccagcctttgttttattttttattttttgagaggtatgattctttctagagattttttctcatggctactattagatcaggaatgggtgattggagattattagattctaggttaacttctaccactttaccctaatacataaaactttttcctaaataaatgatggaaggaataatacttggttacctggcattatttttcagtaagaaaaagctttactaaccactacatttatggaaatttgtaggggtaagtattttataggtcataaaaaacaccataatataacgaatctcattttctttaaatgtgaattaaatcctaacagtcatctttataaaatgaccataggctaaaatcttacgtgtaagtactactacaataaataatttctgaaacctttaaatcatatgagttgggccttttttataacttggaatcaacattttttaataaagtatccatagaaaatgatagatctggccgggcgcggtggctcacacctgtaatcccagcactttgggaggccgagatggctggatcatgaggcaggagaatgacatgaacctaggaggcggagcttgcagtgagccgagatcatgccactgcactccaggctgggcaacagagtgagactccatctc

SEQ ID NO: 79 - DNA, 2028 bp, Homo sapien
gaacctaactttatcatacataagcgtctcgaagtcgcgttaaggaacgttaccagtgaatcactagactagtttactgtaagaggagcattgccttgtctacactcgtatgtgacgtcgcatatgcgacttttcatcgacaccaattgacacgaatactacacacgagaccgggagaagcagagacagttacgtcgtagacagccattcgagaatgagactttacttgatagtcttaatgaggtcggaaatctacctagctcgtgaaattaccaggcaacttctatgatacgattttcggggagcaatcgtgacatagcaattactaaagatatgtttgaagaagcactgcgtgccctggcagatgatgatttcctgacagtgactgggaagaccgtgcgcttgctctgaagccttgtgagcaaggaaggctccctgcatgtcctgcttgctgcacgccacatgggtgtggtctgcatctcagttggccgccatcagtgtaaatagagcttaaagtcatggtttggctgcataaaaattttctaacttgggttcaatatttgtagtgaagtatctgttttcatttttttcacgttataaataaaaatactatgctggccgggcgcggtggctcacacctgtaatcccagcactttgggaggccaatgtgggtggatcatgaggtcaggagttcaagaccagcctagccaagatggtgaaaccccgtctctagtaaagataacaaaaaattagctgggcttgatggcatgcgcctgtaatcccagctactcgggaggttgaggcaggagaatcgcttaaacccaggcggcagaggttgcagtgagccaagatcgcgccactgcactccagcctcagcaatagagtgagactgtctcaaaaaaaaaaaaaaaaaaaacctgccaattttcaaacataccgtagagattattttcaggtgccattttatagtatagcagcagggcttttactctgtgtatgcacagatgcagtctggggcatggtttgtgtgctggactttctcatggccatcatcagtatgcttatggatttgatgacaggcatagcctgggcatatcacctcattggtaaagggctagagcctttcttttttatggcacttctttttttgagatagggtcttactctgtcaccctggctagagtacactggtacaatcacggctcaatgtaggcttaacctcctgggctcaggtgtatgtcactatgcccggctactttttgtattttttggtagagacggcttcgccacgttgcccaggctgcaagcgatatgcctaggctcaagcgatctgcccacctcaacttccggaagtgctgagattacaggtgtgagccactgcacccagcctttgttttattttttattttttgagaggtatgattctttctagagattttttctcatggctactattagatcaggaatgggtgattggagattattagattctaggttaacttctaccactttaccctaatacataaaactttttcctaaataaatgatggaaggaataatacttggttacctggcattatttttcagtaagaaaaagctttactaaccactacatttatggaaatttgtaggggtaagtattttataggtcataaaaaacaccataatataacgaatctcattttctttaaatgtgaattaaatcctaacagtcatctttataaaatgaccataggctaaaatcttacgtgtaagtactactacaataaataatttctgaaacctttaaatcatatgagttgggccttttttataacttggaatcaacattttttaataaagtatccatagaaaatgatagatctggccgggcgcggtggctcacacctgtaatcccagcactttgggaggccgagatggctggatcatgaggcaggagaatgacatgaacctaggaggcggagcttgcagtgagccgagatcatgccactgcactccaggctgggcaacagagtgagactccatctc

SEQ ID NO: 80 - DNA, 2035 bp, Homo sapien
gcaaaggactgcctggcaggtgtcaaaggcagtggtggccacagaggcggtggagagatggccttcagcggttgccaggctccctatctgagcccagccgtccccttttctgggactatccaagggggtctccaggacggatttcagatcactgtcaatggggccgttctcagctgcagtggaaccaggtttgctgtggactttcagacgggcttcagtggaaacgacattgccttccacttcaaccctcggtttgaagacggagggtatgtggtgtgcaacacgaggcagaaaggaacatgggggcccgaggagaggaagatgcacatgcccttccagaaggggatgccctttgacctctgcttcctggtgcagagctcagatttcaaggaacatggatggagctggaagccgttgcaggagcagaaaaccaaacaccgcaagttctcacttataagtaggagctgaacgatgagaacacatggacacaagcggggaaacaacacacactggggcctggtcggggacggagagcatcaggaagattagctaatggatgctgggcttgataccaaggtgatggtgaacgggagcctcttcgtgcagtacttccaccgcgtgcccttccaccgtgtggacaccatctccgtcaatggctctgtgcagctgtcctacatcagcttccagaatccccgcgcagtccccgttcagcctgccttctccacggtgccgttctcccagcctgtctgtttcccacccaggcccaggggcgcagacaaaaacctcccagcgtgcggcctgccaacccagctcccattacccagacagtcatccacacggtgcagagtgcctctggacagatgttctctcagactcccgccatcccacctatgatgtacccccaccctgcctatccgatgcctttcatcaccaccattccgggagggctgtacccatccaagtccatcatcctgtcaggcactgtcctgcccagtgctcagaggtaagccaaaggctccagtgacctctgggaagagagagcccttcaaggtcattccagccattcccctggcttttggcaggctggcgatgatggggaggaaatggggctcagaactcagtggacaaaggtccaggtaggctgcccaccgcaggttccacatcaacctgtgctctgggagccacatcgccttccacatgaacccccgttttgatgagaatgctgtggtccgtaacacccagatcaacaactcttgggggtctgaggagcgaagtctgccccgaaaaatgcccttcgtccgaggccagagcttctcggtgtggatcttgtgtgaagctcactgcctcaaggtggccgtggatggtcagcacgtgtttgaatactaccatcgcctgaggaacctgcccaccatcaacaaactggaagtgggtggcgacatccagctgacccacgtgcagacataggcggctccctggccctggggccgggggctggggtgtggggcagtctgggtcctctcatcatccccacttcccaggcccagcctttccaaccgtgcctgggatctgggctttaatgcagaggccatgtccttatctggtcctgcttctggctacagccaccctggaatcgagaaggcagctgactgggattgccttcctcagccgcagcagcacctggggcgccagctgctggaatcctacaatcccagaaggcgggcacagccagggagaggggaggagtgggcagtgaagatgaagccccatgctcagtcccctcccatcccccacgcagctccaccccagtctcaagccaccagctgtctgctcctggtgggagatggcctcctcagcccctcctctctgacctttaacctcactctcaccttgcaccctgcaccaacccttcacccctcctggaaagcaggcctgatggcttcccactggcctccaccaactgaccagagtgttctcttcaggggactggctcctttcccagtgtccttaaaataaagaaatgaaaatgcttgttggc

SEQ ID NO: 81 - DNA, 1245 bp, Homo sapien
gaaagatatcgtgggcttcttctcagctgacagcctaaattcatgggaactggtacaatcttccccttccatgtggcggctgccctggctgccactggctgacctgtccccgtccttctgacagccgatgcctttcatcaccaccattccgggagggctgtacccatccaagtccatcatcctgtcaggcactgtcctgcccagtgctcagaggtaagccaaaggctccagtgacctctgggaagagagagcccttcaaggtcattccagccattcccctggcttttggcaggctggcgatgatggggaggaaatggggctcagaactcagtggacaaaggtccaggtaggctgcccaccgcaggttccacatcaacctgtgctctgggagccacatcgccttccacatgaacccccgttttgatgagaatgctgtggtccgtaacacccagatcaacaactcttgggggtctgaggagcgaagtctgccccgaaaaatgcccttcgtccgaggccagagcttctcggtgtggatcttgtgtgaagctcactgcctcaaggtggccgtggatggtcagcacgtgtttgaatactaccatcgcctgaggaacctgcccaccatcaacaaactggaagtgggtggcgacatccagctgacccacgtgcagacataggcggctccctggccctggggccgggggctggggtgtggggcagtctgggtcctctcatcatccccacttcccaggcccagcctttccaaccgtgcctgggatctgggctttaatgcagaggccatgtccttatctggtcctgcttctggctacagccaccctggaatcgagaaggcagctgactgggattgccttcctcagccgcagcagcacctggggcgccagctgctggaatcctacaatcccagaaggcgggcacagccagggagaggggaggagtgggcagtgaagatgaagccccatgctcagtcccctcccatcccccacgcagctccaccccagtctcaagccaccagctgtctgctcctggtgggagatggcctcctcagcccctcctctctgacctttaacctcactctcaccttgcaccctgcaccaacccttcacccctcctggaaagcaggcctgatggcttcccactggcctccaccaactgaccagagtgttctcttcaggggactggctcctttcccagtgtccttaaaataaagaaatgaaaatgcttgttggc

SEQ ID NO: 82 - DNA, 4210 bp, Homo sapien
aattaagttcaattttgaaaagatctttgaaaacaacagctgaaaaatgctcagcagtgaaccccacgctttcccctggaaacctggaccctggagctgttgcttctgtcctggcctcctgtggtcacctcctcgagctctgcctgggcttgaggaggccctggtctcagtggagctgagcaccagcaggcacgaggggggtggctgcactgtggcatgctgcgcacccctgggtgccatagccggtcccctgtgtccccagcaccgtgctgctgctgaacccagtggaagtgcaggccgagttccttgctgtagccaataagctgagtacgcccggacactcgcctcacagtgcctacaccaccctgctcctgcacgccttccaggccacctttggggcccactgtgacgtcccgggcctgcactgcaggctacaggccaagaccctggcagagcttgaggacatcttcacggagaccgcagaggcacaggagctggcatctggcatcggggatgctgcagaggcccggcggtggctcaggaccaagctgcaggcggtgggagaaaaagctggcttccctggggtgttagacactgcaaaaccagggaagctccacaccatccccatccctgtcgccaggtgctacacctacagctggagccaggacagctttgacatcctgcaggaaatcctgctcaaggaacaggagctactccagccagggatcctgggagatgatgaagaggaggaagaggaggaggaggaggtggaggaggacttggaaactgacgggcactgtgccgagagagattccctgctctccaccagctctttggcgtcccatgactccaccttgtcccttgcatcctcccaggcctcggggccggccctctcgcgccatctgctgacttcctttgtctcaggcctctctgatggcatggacagcggctacgtggaggacagcgaggagagctcctccgagtggccttggaggcgtggcagccaggaacgccgaggccaccgcaggcctgggcagaagttcatcaggatctataaactcttcaagagcaccagccagctggtactgcggagggactctcggagcctggagggcagctcggacacggccctgcccctgaggcgggcagggagcctctgcagccccctggacgaaccagtatcacccccttcccgggcccagcgctcccgctccctgccccagcccaaactcggtacccagctgcccagctggcttctggcccctgcttcacgcccccagcgccgccgccccttcctgagtggagatgaggatcccaaggcttccacgctacgtgttgtggtctttggctccgatcggatttcagggaaggtggctcgggcgtacagcaaccttcggcggctggagaacaatcgcccactcctcacacggttcttcaaacttcagttcttctacgtgcctgtgaagcgaagtcatgggaccagccctggtgcctgtccaccccctcggagccagacgccctcacccccgacagactcccctaggcacgccagccctggagagctgggcaccaccccatgggaggagagcaccaatgacatctcccactacctcggcatgctggacccctggtatgagcgcaatgtactgggcctcatgcacctgccccctgaagtcctgtgccagcagtccctgaaggctgaagcccaggccctggagggctccccaacccagctgcccatcctggctgacatgctactctactactgccgctttgccgccagaccggtgctgctgcaagtctatcagaccgagctgaccttcatcactggggagaagacgacagagatcttcatccactccttggagctgggtcactccgctgccacacgtgccatcaaggcgtcaggtcctggcagcaagcggctgggcatcgatggcgaccgggaggctgttcctctaacactacagattatttacagcaagggggccatcagtggacgaagtcgctggagcaacctggagaaggtctgtacctccgtgaacctcaacaaggcctgccggaagcaggaggagctggattccagcatggaggccctgacgctaaacctgacagaagtggtgaaaaggcagaactccaaatccaagaagggctttaaccagattagcacatcgcagatcaaagtggacaaggtgcagatcatcggctccaacagctgcccctttgctgtgtgcctggaccaggatgagagaaagatcctgcagagtgtagtcagatgtgaggtctcaccgtgctacaagccagagaagagcgacctctcctcaccaccccagacgcctcctgacctgccggcccaggccgcacctgatctctgctcccttctctgcctgcccatcatgactttcagtggagctctgccctagtgtgggcccagcgccagactggacagaagccctggggcaacctcctcggccacccctccaggacagtccctctctgtggagaactgaatggccctgtgcagagccatagtcccactgtgggtcctgcaatgagcaggggctgggagtagagggtttctggggcctcagggttctgggaaagcaacagctatcagagagagaagggccagaccccatagcctcttagattcctggcagtagaaggagaaggatgggtaaattgacctctgaagtccctgaccattagcatggtctaggatcctttctagaaggaagatctgaggctctggtgctcagggggatggcttgggccttttctctcaaccttggctgagcctaccccttactttgccaaagacttgaggaccctgtatgtctggagttcagtcccctcctctgtggggctcaggtgattgaaatgtggatgaaacatttctctacttcaagaccacctctccctgcaaacaccacacacacatggcatgcatgtacgcacatgcgcacacacacacgcacacacctcaataatttctctcaagtttcctgagtctccagaaaaacagcactaacgctggacctgtctactctcagaacccggcacagattctctcttgatctccttttggaatctgagattcttagaagacaggatagggttaaatttagtagcagctcagttctagctaaatcactagaggaagttaattaactttaagccttcatttctccagcactaaaatggagtggagagttggggtggaaataagacatccttaaaaggttaaattgtctgcaaagcacctagcccagtgccgagctcccagtaggtgttcagtaaagcttagtgcctgactttctgaacactgattcctcctgtttggagtcactgggatactctcattgccgttgggatgttcctcactccttcccagttcgtggctgaggcagaacccagactgaagagggaagagacattccagaggaggattgccttcgtcagggtaaggggtgggctgctcaggggccctacccttcacccccttctgtatcagattggccctcccactcccatctcactctgcgtgtacaatcttccatatccgcaagttcactggcactcttctggcacctgggcaagatcccagaacagaggatggagtgactggcctcacagagcttagtgcccgactcaggggaaatgggactggtgcatgggaaatggtcagcctaggataggacacgagagtctgaaattcaaagcaaccagcttgaagtggtttgagaagctggaagcaaacatgggctagagagatagggcagaagtcaagacgaggatctggactgatgtggagaaagtagccacggaagcatgaactgtatcctgcacaaagtccctcttccccgcctcctaattcattatgcccaaaaggccttacgtgaaattccagcccagagtactcatgacttgagagacgtggacagagccagcttctaccttgcctggccgtctctcccctgtcttaatgtctgctcttgctctaagctccagaagagtggcgggccatgtatcttcaatatgtttttgctgtatgggcaggttgtcttattatgtgatcaacagatgtccaggaactaatgagtggaatttaatattattgtcaaataaaacttgatttgtcctataaaaaaaaaccagtagttactttgctgcatgaccctgctagttggacagtttatataaatcattt

SEQ ID NO: 83 - DNA, 447 bp, Homo sapien
ccactcttctggagcttagagcaagagcagacattaagtacaggggagagacggccagccacggaagcatgaactgtatcctgcacaaagtccctcttccccgcctcctaattcattatgcccaaaaggccttacgtgaaattccagcccagagtactcatgacttgagagacgtggacagagccagcttctaccttgcctggccgtctctcccctgtcttaatgtctgctcttgctctaagctccagaagagtggcgggccatgtatcttcaatatgtttttgctgtatgggcaggttgtcttattatgtgatcaacagatgtccaggaactaatgagtggaatttaatattattgtcaaataaaacttgatttgtcctataaaaaaaaaccagtagttactttgctgcatgaccctgctagttggacagtttatataaatcattt

SEQ ID NO: 84 - DNA, 1319 bp, Homo sapien
ggctgaattgggccagagaggtctcattggctgaattcctgcaccggctcgtcggaggcgggacccaaagtaggctaggcctacggaagctgggtcttcttgctgtgaggtcgcgttccccagtgttacggagggtccttgaggcaggagtgaaaattgggtctgggggttagtcctggggtggaggtctgggcacgccgggtcggaccccctccatcttcggttttgcacaccccgctttccagcgcggagtcgcggcgggtagggcggcgtcgcgtgcgtgacgtcatccagcggcgcctcgcgaggctccagtggccttgacctcccgcggcgtgggaggctgcgcggcgatgctgcagttcgtccgggccggggcgcgggcctggcttcggcctaccggcagccagggcctgagttccctggcggaagaggcagcgcgtgcgaccgagaacccggagcaggtggcgagcgagggtctcccggagcccgtgctgcgcaaagtcgagctcccggtacccactcatcgacgcccagtgcaggcctgggtcgagtccttgcggggcttcgagcaggagcgcgtgggcctggccgacctgcaccccgatgttttcgccaccgcgcccaggctggacatactgcaccaggttgctatgtggcagaagaacttcaagagaattagctatgccaagaccaagacgagagccgaggtgcggggcggtggccggaagccttggccgcagaaaggcactgggcgggcccggcatggcagcatccgctctccgctctggcgaggaggaggtgttgcccatggcccccggggccccacaagttactactacatgctgcccatgaaggtgcgggcgctgggtctcaaagtggcactgaccgtcaagctggcccaggacgacctgcacatcatggactccctagagctgcccaccggagacccacagtacctgacagagctggcgcactaccgccgctggggggactccgtactcctcgtggacttaacacacgaggagatgccacagagcatcgtggaggccacctctaggcttaagaccttcaacttgatcccggctgttggcctaaatgtgcacagcatgctcaagcaccagacgctggtcctgacgctgcccaccgtcgccttcctggaggacaagctgctctggcaggactcacgttacagacccctctggwcyccmtrkawgctgattcaytatggggggaggtgtattgaagtcctccagacaaccctcagatttgatgatttcctagtagaactcacagaaataaagagctgttatactgtg

SEQ ID NO: 85 - DNA, 1018 bp, Homo sapien
ctgtttcccataatctccttggggcgctggatgtgccggttcagtgttcacagtagaatctccatatgtcaaactgatgtcaccatcattgagaataagatcagaatcatcatctttcaactgttcctggttttcgtaagcctggggctgtgaggcacctgcgatgggtccacagcaggcagggagtgttgttgtcacggagcccgctgtgggtcagcagaggcttcagatagttatgatcaaagttgtacctgcccgggcgtcgagcgccgcccgggcaggtctcctgtggctgggcctagccctgttgggggctctgcatgcccaggcccaggactccacctcagacctgatcccagccccacctctgagcaaggtccctctgcagcagaacttccaggacaaccaattccaggggaagtggtatgtggtaggcctggcagggaatgcaattctcagagaagacaaagacccgcaaaagatgtatgccaccatctatgagctgaaagaagacaagagctacaatgtcacctccgtcctgtttaggaaaaagaagtgtgactactggatcaggacttttgttccaggttgccagcccggcgagttcacgctgggcaacattaagagttaccctggattaacgagttacctcgtccgagtggtgagcaccaactacaaccagcatgctatggtgttcttcaagaaagtttctcaaaacagggagtacttcaagatcaccctctacgggagaaccaaggagctgacttcggaactaaaggagaacttcatccgcttctccaaatctctgggcctccctgaaaaccacatcgtcttccctgtcccaatcgaccagtgtatcgacggctgagtgcacaggtgccgccagctgccgcaccagcccgaacaccattgagggagctgggagaccctccccacagtgccacccatgcagctgctccccaggccaccccgctgatggagccccaccttgtctgctaaataaacatgtgccctcagg

SEQ ID NO: 86 - DNA, 461 bp, Homo sapien
tgcgcggtcgatctaaggattcctgcaaacggtgggcagcccggcgagttcacgcgggcaacattaagagttaccctggattaacgagttacctcgtccgagtggtgagcaccaactacaaccagcatgctatggtgttcttcaagaaagtttctcaaaacagggagtacttcaagatcaccctctacgggagaaccaaggagctgacttcggaactaaaggagaacttcatccgcttctccaaatctctgggcctccctgaaaaccacatcgtcttccctgtcccaatcgaccagtgtatcgacggctgagtgcacaggtgccgccagctgccgcaccagcccgaacaccattgagggagctgggagaccctccccacagtgccacccatgcagctgctccccaggccaccccgctgatggagccccaccttgtctgctaaataaacatgtgccctcagg

SEQ ID NO: 87 - DNA, 422 bp, Homo sapien
ccgtcccctttctccgaaaggcacatttgagttaccctggattaacgagttacctcgtccgagtggtgagcaccaactacaaccagcatgctatggtgttcttcaagaaagtttctcaaaacagggagtacttcaagatcaccctctacgggagaaccaaggagctgacttcggaactaaaggagaacttcatccgcttctccaaatctctgggcctccctgaaaaccacatcgtcttccctgtcccaatcgaccagtgtatcgacggctgagtgcacaggtgccgccagctgccgcaccagcccgaacaccattgagggagctgggagaccctccccacagtgccacccatgcagctgctccccaggccaccccgctgatggagccccaccttgtctgctaaataaacatgtgccctcagg

SEQ ID NO: 88 - DNA, 480 bp, Homo sapien
atgaagtcatagctggaatctgagtacttccgttccaggttgctcggcgctaggctgagttcacgctgggcatacatttaagagttaccctgggagtatccgtacgtttacctcgtccgagtggtgagcaccaactacaaccagcatgctatggtgttcttcaagaaagtttctcaaaacagggagtacttcaagatcaccctctacgggagaaccaaggagctgacttcggaactaaaggagaacttcatccgcttctccaaatctctgggcctccctgaaaaccacatcgtcttccctgtcccaatcgaccagtgtatcgacggctgagtgcacaggtgccgccagctgccgcaccagcccgaacaccattgagggagctgggagaccctccccacagtgccacccatgcagctgctccccaggccaccccgctgatggagccccaccttgtctgctaaataaacatgtgccctcagg

SEQ ID NO: 89 - DNA, 1618 bp, Homo sapien
agttgctgaagactgaattgtaaagaaaaaaaatctccaaccccttctgtctgtcaggccttgagacttgaaaccagaagaagtgtgagaagactggctagtgtggaagtatagtgaacacactgattaggttatggtttaatgttacaacaactattttttaagaaaaacaagttttagaaatttggtttccatggggtaccacctgaagaccctcacactcaacttcaccatctccaatctccagtattcaccagatatgggcaagggctcagctacattcaactccaccgagggggtccttcagcacctgctcagacccttgttccagaagagcagcatgggccccttctacttgggttgccaactgatctccctcaggcctgagaaggatggggcagccactggtgtggacaccacctgcacctaccaccctgaccctgtgggccccgggctggacatacagcagctttactgggagctgagtcagctgacccatggtgtcacccaactgggcttctatgtcctggacagggatagcctcttcatcaatggctatgcaccccagaatttatcaatccggggcgagtaccagataaatttccacattgtcaactggaacctcagtaatccagaccccacatcctcagagtacatcaccctgctgagggacatccaggacaaggtcaccacactctacaaaggcagtcaactacatgacacattccgcttctgcctggtcaccaacttgacgatggactccgtgttggtcactgtcaaggcattgttctcctccaatttggaccccagcctggtggagcaagtctttctagataagaccctgaatgcctcattccattggctgggctccacctaccagttggtggacatccatgtgacagaaatggagtcatcagtttatcaaccaacaagcagctccagcacccagcacttctacctgaatttcaccatcaccaacctaccatattcccaggacaaagcccagccaggcaccaccaattaccagaggaacaaaaggaatattgaggatgcgctcaaccaactcttccgaaacagcagcatcaagagttatttttctgactgtcaagtttcaacattcaggtctgtccccaacaggcaccacaccggggtggactccctgtgtaacttctcgccactggctcggagagtagacagagttgccatctatgaggaatttctgcggatgacccgccgggcaggtacccagctgcagaacttcaccctggacaggagcagtgtccttgtggatgggtattctcccaacagaaatgagcccttaactgggaattctgaccttcccttctgggctgtcatcctcatcggcttggcaggactcctgggactcatcacatgcctgatctgcggtgtcctggtgaccacccgccggcggaagaaggaaggagaatacaacgtccagcaacagtgcccaggctactaccagtcacacctagacctggaggatctgcaatgactggaacttgccggtgcctggggtgcctttcccccagccagggtccaaagaagcttggctggggcagaaataaaccatattggtcggtaaaaaaactctgagcct

SEQ ID NO: 90 - DNA, 343 bp, Homo sapien
gaaccgttgtcattccagatgtggattctggcggtgaagccaattccgcaaaggttacwaggcatcctcaccaggggmcccgcctgctgctcccagstggcctgcggccmtgmmtatgctcaaggscctggaaacccatgcttcgagacaacgtgactttaatgggagggtgggtgggccgcagacaggctggcagggcaggtgctgcgtggggccctctccagcccgtcctaccctgggctcacatggggcctgtgcccacccctcttgagtgtcttggggacagctctttccacccctggaagatggaaataaacctgcgtgtgggtggagtgttaggacc

SEQ ID NO: 91 - DNA, 516 bp, Homo sapien
ccccgattatgaatggcggaggcgtgaatggcgtacgcgttgaaggccggaggcgtagaatggccatcatcatcaagggctatgtgcctcccacaggcaagagctttgctatcaacttcaaggtgggctcctcaggggacatagctctgcacattaatccccgcatgggcaacggtaccgtggtccggaacagccttctgaatggctcgtggggatccgaggagaagaagatcacccacaacccatttggtcccggacagttctttgatctgtccattcgctgtggcttggatcgcttcaaggtttacgccaatggccagcacctctttgactttgcccatcgcctctcggccttccagagggtggacacattggaaatccagggtgatgtcaccttgtcctatgtccagatctaatctattcctggggccataactcatgggaaaacagaattatcccctaggactcctttctaagcccctaataaaatgtctgagggtgtctcatgaaaaaaaa

SEQ ID NO: 92 - DNA, 5367 bp, Homo sapien
agccgggggtagtgtactttgtgctgcttactgcagaaaaccacagtggagtgagccgtcctgtttacagagctgaaagcccacctggaggtgaatggatcgagattgatggttttcccattaagggtccaggaccatttaatgaaaccgtcacagaaaaggaagtgcccaacaagcccttgcgtgtgcgtgtccggtcctcagatgacaggctgtccgttgcgtggaaggcaccacgcctgtctggagccaagagtccacgcagatcacggggttttctcctgggctacggggagagtggccggaagatgaattatgttccactgacaagagatgaacggacacacgaaattaaaaagctagcctcggaatccgtgtatgtggtctccctgcagtccatgaactctcagggccggagccaaccagtctacagggctgccctaacaaagcgaaagatttcagaagaggacgaattggatgtacctgacgacatcagcgtccgggttatgtcatctcagtctgtgcttgtgtcctgggtggatcctgttctggaaaaacagaagaaagttgttgcatcaagacagtacaccgtgcgctatcgagagaagggggaattggccaggtgggattataagcagatcgctaacaggcgtgtgctgattgagaacctgattccagacactgtgtatgaatttgcagtccgtatttcacagggtgaaagagatggcaaatggagtacgtcagtcttccaaagaacaccagaatctgcccctaccacagctcctgaaaacttgaacgtctggccagtcaatggcaaacctacagttgtcgctgcatcttgggatgcgctaccagagactgaggggaaagtgaaagaatacattctttcatacgccccggctctcaaaccatttggagcaaagtccctcacctatcctggagacactacttctgccctggtggatggtctgcagcctggggaacgctatcttttcaaaatccgggccacaaacaggagaggcctgggacctcactccaaagccttcattgtcgctatgccaacaaccagtaaggcggatgttcagcagaacacggaggacaatgggaaacccgaaaaacctgagccttcctcaccttctcccagagctccagcttcctcccaacacccctctgtgcctgcttctccccaagggagaaatgccaaggaccttcttcttgacttgaagaacaaaatattggctaatggtggggcgccccgaaaaccccagcttcgcgccaagaaggcagaggagctggatcttcagtcgacagaaatcactggggaggaggagctgggttcccgggaggactcgcccatgtcaccctcagacacccaagaccagaaacggaccctgaggccgccaagtagacacggccactcggtggttgctcccggcaggactgcagtgagggcccggatgccagcgctgccccgaagggaaggcgtagataagcctggcttttccctggccacgcagccccgcccaggggcgcccccctcggcttcggcctctcctgcccaccacgcgtccacccagggcacctctcatcgtccttccctgcctgccagcttgaatgacaacgacttggtggactcagacgaagatgagcgcgctgtgggctccctccaccccaagggcgccttcgcccagccccggccagccctgtcccccagccgccagtccccgtccagcgttctccgcgacagaagctctgtgcaccccggcgcaaagccagcctcgccggcscggaggaccccccattcaggggccgcagaggaagattccagtgcctcagccccaccctcaagactttctccaccccatgggggatcatctcggctgctgcccacccagccacacctgagctctccactttccaagggcgggaaggatggtgaggacgccccagccaccaactccaatgcgccatcacggtccaccatgtcctcctccgtctcttctcatctctcgtccaggacgcaggtctctgagggagcggaggcttctgatggtgaaagccacggtgacggcgatagggaagacggcggaaggcaggcggaggccacggcccagacgctgcgggcccggcctgcctctggacacttccatttgctcagacacaaaccctttgctgccaacgggaggtctccaagcaggttcagcattgggcggggacctcggctgcagccctccagctccccacagtcgactgtgccctcccgagcccaccccagggttccctctcactctgattcccaccctaagcttagctcaggtatccatggagacgaggaggatgagaagccgcttcctgccaccgttgtcaatgaccacgtgccttcctcctccaggcagcccatctcccggggctgggaggacttaaggagaagcccgcagagaggggccagcctgcatcggaaggaacccatcccagagaaccccaaatccacaggggcagatacacatcctcagggcaagtactcctccctggcctccaaggctcaggatgttcaacagagcacagacgcggacacggagggtcattctcccaaagcacagccagggtccacagaccgccacgcgtcccctgctcgtcctcccgcagcacggtcacagcagcatcccagtgttcccagaaggatgacacccggccgggccccagaacagcagccccctcctcccgtcgccacgtcccagcaccacccgggaccccagagcagagacgcgggtcggtcaccttcccagcccaggctctcactgacccaggccgggcggccccgccccacgtcgcagggccgctcccactcctcctcggacccttacacggcgagctccagagggatgctccccacggccctccagaaccaggacgaggatgcccagggcagctacgacgacgacagcacagaagtcgaggcccaggatgtgcgggcccccgcgcacgccgcgcgcgccaaggaggcagctgcgtcccttcccaagcaccagcaggggcggcaaagacgccgatgggagcctcgccaaggaagagagggagcctgccatcgcgcttgcccctcgcggagggagcctggctcctgtgaagcgacctctccccccacctccaggcagctcccccagggcctcccacgtcccttcccgaccgccgcctcgcagcgctgccaccgtgagccccgtcgcgggcacccacccctggccgcrgtacaccacgcgcgccccacctggccacttctccaccaccccgatgctgtccttgcgccagaggatgatgcatgccagattccgtaaccctctctcccgacagcctgccagaccctcttacagacaaggttataatggcagaccaaatgtagaagggaaagtccttcctggtagtaatggaaaaccgaatggacagagaattatcaatggccctcaaggaacaaagtgggttgtggaccttgatcgtgggttagtattgaatgcagaaggaaggtacctccaagattcacatggaaatcctcttcggattaaactaggaggagatggtcgaaccattgtagatctggaagggacccccgtggtgagtcctgacggcctcccactctttgggcaggggcgacatggcacacctctggccaatgcccaagataagccaattttgagtcttggaggaaagccgctggtgggcttggaggtcatcaaaaaaaccacccatccccctaccactaccatgcagcccaccactactacgacgcccctgcctaccactacaaccccgaggcccaccactgccaccacccgccgcacgaccaccaggcgtccaacaaccacagtccgaaccactacgcggacaaccaccaccaccacccccaaacccaccactcccatccccacctgtccccctgggaccttggaacggcacgacgatgatggcaacctgataatgagctccaatgggatcccagagtgctacgctgaagaagatgagttctcaggcttggagactgacactgcagtacctacggaagaggcctacgttatatatgatgaagattatgaatttgagacgtcaaggccaccaaccaccactgagccttcgaccactgctaccacaccgagggtgatcccagaggaaggcgccatcagttcctttcctgaagaagaatttgatctggctggaaggaaacgatttgttgctccttacgtgacgtacctaaataaagacccatcagccccgtgctctctgactgatgcactggatcacttccaagtggacagcctggatgaaatcatccccaatgacctgaagaagagtgacctgcctccccagcatgctccccgcaacatcaccgtggtggccgtggaaggttgccactcatttgtcattgtggactgggacaaagccaccccaggagatgtggtcacaggttacttggtttacagtgcatcctatgaagacttcatcaggaacaagtggtccactcaagcttcatcagtaactcacttgcccattgagaacctaaagcccaacacgaggtattattttaaagtgcaagcacaaaatcctcatggctacggacctatcagcccttcggtctcatttgtcaccgaatcagataatcctctgcttgttgtgaggcccccaggcggtgagcctatctggatcccattcgctttcaaacatgatcccagctacacggactgccatggacggcaatatgtgaagcgcacgtggtatcgaaagttcgtgggagttgttctttgtaattcactgaggtataaaatctacctcagtgacaacctgaaagatacattctacagcattggagacagctggggaagaggtgaagaccattgccaatttgtggattcacaccttgatgggacgaagatgtccctcagtacctccaagcaagtagctttccacatttgtcacagaaatcagaggagagatggtgttgggagccctttggagaacgccagtctcccaggccccctgcatctatcgagtttgcaatgtcacaacctctctgatcttgtgctcagcatgattctttaatagaagttttattttttcgtgcactctgctaataatgtgggtgagccagtggaacagcgggagacctgcgctagttttacagattgcctccttatgacgcggctcaaaaggaaaccaagtggtcaggagttgtttctgacccactgatctctactaccacaaggaaaatagtttaggagaaaccagcttttactgtttctgaaaaattacagcttcatcctgtcaagtagacaaggaatgcctgtgccaataaagtttctccaacttgaagtctactcatgatgg

SEQ ID NO: 93 - DNA, 781 bp, Homo sapien
gagtatctgtgtgcaggtgtgtgcgtgtgtgtgctgtgcgtttgtgtgtgtcctgtacttggggagagatcagtagcatttgaggaagtaagagaaaagaatcatggtacctcagggtttctttccctttactcgctggcagccattgtctgtgggcacctcatgtttttccacactctactgggccgtggaggtaacgatcacccaggccagtctcctctgcctgggatgcgccctctgagaggaggcctagcagggcaggctccctctgggcatccctggatgcagcctctggacacatgcctcctttaaagtgtccgggtgcagctcaggttgagtggaggtagaaggagaaacagacatgtttaccacgcgttttccaaagctcctgatctttcccaagattgtaactgaaaactgctgtctcttgttttgttcgttttgggggtggtggtgctggctgggccatgcttgtgaagtgatgtgtgtctctgatttaacggattcactgttttctctgctaattgagagagcgttatttacattatttatttgttttgacacaagtgctttcagtgttttatcctagctaatggcttcttaaaggtaataaaacccttccaacgtaattggtcagataaaactttttttcttgtatgcttaaataaagcaattagtgaagcacttctatccaaaatgacttttttgtccttttttaaaaccaatttactgttactggaaactttttgtacaataaagcaatcacgcagattaaagaaca

SEQ ID NO: 94 - DNA, 1820 bp, Homo sapien
atttaacttatattagttgagcatattctcattttcaaccacaagaggtcctcttccgttctatgacttctaggagtccaagattgatctccttgatcggaaggaggatgtgaagaaaaaactgaagaaggccttctgtgagccaggaaatgtggagaacaatggggttctgtccttcatcaagcatgtcctttttccccttaagtccggtaacactctctgttttcttcctagaggccaggctagaatagaaaagttcgtgctgtgatcatacttgtgatttgtcacagactcttccttcagggactggctgccctgattctctgctctgatttcttatatattaaagtatgaatgatgttgggatgtaatttaattgtccatatattcgttaccaggctaggttctgagggaatactggagtgggcagaggtgttagaagtaagggtgggggcagacatgttgaactagaggaatacaacaaaatagatataagccacaagccttcccctgaagcagctgagatgctagctgggtatacaatagtgccactcatccaatttaagaataataccatacaataaagttcagaatatatggcaaaaactacaaatagtcatgcatgtgggctaggaatagtcatgcatgtgagctaggaatgctgtcaatgagtttgttgacatggatccttttccttatagagtttgtgatcctacgagatgagaaatggggtggaaacaaaacctacacagcttacgtggacctggaaaaggactttgctgctgaggttgtacatcctggagacctgaagaattctgttgaagtcgcactgaacaagttgctggatccaatccgggaaaagtttaatacccctgctcctggtgagcacgtgtttgtgaagggctatgaaaagggccaaccagatgaggagctcaagcccaagaagaaagtcttcgagaagttgcaggctgacttcaaaatttctgaggagtgcatcgcacagtggaagcaaaccaacttcatgaccaagctgggctccatttcctgtaaatcgctgaaaggggggaacattagctagccagcccagcatcttccccccttcttccaccactgagtcatctgctgtctcttcagtctgctccatccatcacccatttacccatctctcaggacacggaagcagcgggtttggactctttattcggtgcagaactcggcaaggggcagcttaccctccccagaacccaggatcatcctgtctggctgcagtgagagaccaacccctaacaagggctgggccacagcagggagtccagccctaccttcttcccttggcagctggagaaatctggtttcaatataactcatttaaaaatttatgccacagtccttataattggaaaaatactggtgcccaggttttcttggagttatccaagcagctgcgcccctagctgggatctggtacctggactaggctaattacagcttctccccaacaggaaactgtgggatttgaaaaggaaagggaagggaaaacagagaacctagtggtctaccaagtggttggcaactttcccaatgtctgcttactctgaggcttggcactgggggccagggcctgccccagggctcctggaatttcccttgatccagctaggctgggacactccctaaatcagctgcgtgttgttagcatcaggcagaatgaatggcagagagtgattctgtcttcatagagggtggggtacttctccataaggcatctcagtcaaatccccatcactgtcataaattcaaataaaatgtctgaacaaggg

SEQ ID NO: 95 - DNA, 1953 bp, Homo sapien
ggcccgctgcgctgagacactgaaggggtgtccgggagctgctgaaagcgtgtagacctcgcgacggtcccgcggtagacatcgatataagaagtaatgggctgccacagagcccaaattccctgctgttcgactggctttgcagaattttgacatgacttacagtgtgcagtttggagatctttggccatcaatccgtgtcagtctcctctcagagcagaagtatggtgcactggtcaataactttgctgcctgggatcatgtaagtgctaagctggagcagctgagtgccaaggattttgtgaatgaagccatctcccactgggaactgcagtctgagggtggccaatctgcagccccatcccctgcctcctgggcctgcagtccgaaccttcgatgcttcacttttgacagaagggataacagtcgcttccctcctgccagagtttgtgatcctacgagatgagaaatggggtggaaacaaaacctacacagcttacgtggacctggaaaaggactttgctgctgaggttgtacatcctggagacctgaagaattctgttgaagtcgcactgaacaagttgctggatccaatccgggaaaagtttaatacccctgccctgaaaaaactggccagcgctgcctacccagatccctcaaagcagaagccaatggccaaaggccctgccaagaattcagaaccagaggaggtcatcccatcccggctggatatccgtgtggggaaaatcatcactgtggagaagcacccagatgcagacagcctgtatgtagagaagattgacgtgggggaagctgaaccacggactgtggtgagcggcctggtacagttcgtgcccaaggaggaactgcaggacaggctggtagtggtgctgtgcaacctgaaaccccagaagatgagaggagtcgagtcccaaggcatgcttctgtgtgcttctatagaagggataaaccgccaggttgaacctctggaccctccggcaggctctgctcctggtgagcacgtgtttgtgaagggctatgaaaagggccaaccagatgaggagctcaagcccaagaagaaagtcttcgagaagttgcaggctgacttcaaaatttctgaggagtgcatcgcacagtggaagcaaaccaacttcatgaccaagctgggctccatttcctgtaaatcgctgaaaggggggaacattagctagccagcccagcatcttccccccttcttccaccactgagtcatctgctgtctcttcagtctgctccatccatcacccatttacccatctctcaggacacggaagcagcgggtttggactctttattcggtgcagaactcggcaaggggcagcttaccctccccagaacccaggatcatcctgtctggctgcagtgagagaccaacccctaacaagggctgggccacagcagggagtccagccctaccttcttcccttggcagctggagaaatctggtttcaatataactcatttaaaaatttatgccacagtccttataattggaaaaatactggtgcccaggttttcttggagttatccaagcagctgcgcccctagctgggatctggtacctggactaggctaattacagcttctccccaacaggaaactgtgggatttgaaaaggaaagggaagggaaaacagagaacctagtggtctaccaagtggttggcaactttcccaatgtctgcttactctgaggcttggcactgggggccagggcctgccccagggctcctggaatttcccttgatccagctaggctgggacactccctaaatcagctgcgtgttgttagcatcaggcagaatgaatggcagagagtgattctgtcttcatagagggtggggtacttctccataaggcatctcagtcaaatccccatcactgtcataaattcaaataaaatgtctgaacaaggg

SEQ ID NO: 96 - DNA, 1774 bp, Homo sapien
taaaattatttttcctttttatttcaggaattacaacatatcgttggatcacagcacatcagagcagagaaaggtaagcatggatccatacatctgtatgaaatcccacagggtcactactattttggctataataatatggtttctctcatctccagcgatggtggatggctcatggttagatctggccaagaggagcaagcttgaagctcagccttttgctcatctcactattaatgccaccgacatcccatctggttcccataaagtgagtctgtcctcttggtaccatgatcggggttgggccaagatctccaacatgacttttagcaatggaaaactaatagttaatcaggatggcttttattacctgtatgccaacatttgctttcgacatcatgaaacttcaggagacctagctacagagtatcttcaactaatggtgtacgtcactaaaaccagcatcaaaatcccaagttctcataccctgatgaaaggaggaagcaccaagtattggtcagggaattctgaattccatttttattccataaacgttggtggattttttaagttacggtctggagaggaaatcagcatcgaggtctccaacccctccttactggatccggatcaggatgcaacatactttggggcttttaaagttcgagatatagattgagccccagtttttggagtgttatgtatttcctggatgtttggaaacattttttaaaacaagccaagaaagatgtatataggtgtgtgagactactaagaggcatggccccaacggtacacgactcagtatccatgctcttgaccttgtagagaacacgcgtatttacagccagtgggagatgttagactcatggtgtgttacacaatggtttttaaattttgtaatgaattcctagaattaaaccagattggagcaattacgggttgaccttatgagaaactgcatgtgggctatgggaggggttggtccctggtcatgtgccccttcgcagctgaagtggagagggtgtcatctagcgcaattgaaggatcatctgaaggggcaaattcttttgaattgttacatcatgctggaacctgcaaaaaatactttttctaatgaggagagaaaatatatgtatttttatataatatctaaagttatatttcagatgtaatgttttctttgcaaagtattgtaaattatatttgtgctatagtatttgattcaaaatatttaaaaatgtcttgctgttgacatatttaatgttttaaatgtacagacatatttaactggtgcactttgtaaattccctggggaaaacttgcagctaaggaggggaaaaaaatgttgtttcctaatatcaaatgcagtatatttcttcgttctttttaagttaatagattttttcagacttgtcaagcctgtgcaaaaaaattaaaatggatgccttgaataataagcaggatgttggccaccaggtgcctttcaaatttagaaactaattgactttagaaagctgacattgccaaaaaggatacataatgggccactgaaatctgtcaagagtagttatataattgttgaacaggtgtttttccacaagtgccgcaaattgtacctttttttttttttcaaaatagaaaagttattagtggtttatcagcaaaaaagtccaattttaatttagtaaatgttatcttatactgtacaataaaaacattgcctttgaatgttaattttttggtacaaaaataaatttatatgaaaacctga

SEQ ID NO: 97 - DNA, 3873 bp, Homo sapien
acctaacggcattccggaacattccacaagatggcgcccttgctttccaatcttcgggctacgggcggaggacgccttgccaggacgtcgacctcgctctgcaaggttcaggggccgacctcagacagaggctcgctctaggggcatgggcgggggccagacgggcctcgagtgggatcctggcacggttggccgatcggcccgggatcccggctgcgggcccgtgtctgccctagcgcgatgggctcgaatgcccggctccacgaatcccggcctttcacccccacggcctctcggcactgccccagctagacaccagcgagctcgtcacagcgcgggcaggcactgcggggcagctgcagacgagccttgtcatacggccggaggaggcctcgcctgcccgtgcggcgggctccgggcaccctgataccttgacacaggaggccccgggcggccgggaagggctgtgcgggggagggactgcgtctacacccgcgcccgactcgctcgggtcacggcactgccctgccaccaggcggctggggcgggggtgaggccaggcgtccgccctcgcgattctgttttctacgctgaggctcggagccttcgaagaacgggacagcggggcccacggacggctctgaaggccttcccgcggccgcaagagctctcggcggccggcgtttgaggcgcgcggctccgctgggaagcgagacccgggtggcgggacaagacttgcttcccggccacgcgcgctcggccggccgtggggcggggcataggccgtgacgtggtgtcgcgtatcgagtctccgcccccttcccgcctccccgtatataagacttcgccgagcactctcactcgcacaagtggaccggggtgttgggtgctagtcggcaccagaggcaagggtgcgaggaccacggccggctcggacgtgtgaccgcgcctagggggtggcagcgggcagtgcggggcggcaaggcgaccatggagcttttgcggactatcacctaccagccagccgccagcaccaaaatgtgcgagcaggcgctgggcaagggttgcggagcggactcgaagaagaagcggccgccgcagccccccgaggaatcgcagccacctcagtcccaggcgcaagtgcccccggcggcccctcaccaccatcaccaccattcgcactcggggccggagatctcgcggattatcgtcgaccccacgactgggaagcgctactgccggggcaaagtgctgggaaagggtggctttgcaaaatgttacgagatgacagatttgacaaataacaaagtctacgccgcaaaaattattcctcacagcagagtagctaaacctcatcaaagggaaaagattgacaaagaaatagagcttcacagaattcttcatcataagcatgtagtgcagttttaccactacttcgaggacaaagaaaacatttacattctcttggaatactgcagtagaaggtcaatggctcatattttgaaagcaagaaaggtgttgacagagccagaagttcgatactacctcaggcagattgtgtctggactgaaataccttcatgaacaagaaatcttgcacagagatctcaaactaggtaagtcattgacgccaaaagctgagttttgtgttagagttcttttttctctctctgtttttttttacatattaatgttcttaattgggatctggtgtctgcaatcttgcttttgaatgggcgactttcatataacaattggctgcctggctccaaagtggatgtgtgtgtacttggttagaacgcattttcaaagggattcacattttgttttgtttatcgtctagggaacttttttattaatgaagccatggaactaaaagttggggacttcggtctggcagccaggctagaacccttggaacacagaaggagaacgatatgtggtaccccaaattatctctctcctgaagtcctcaacaaacaaggacatggctgtgaatcagacatttgggccctgggctgtgtaatgtatacaatgttactagggaggcccccatttgaaactacaaatctcaaagaaacttataggtgcataagggaagcaaggtatacaatgccgtcctcattgctggctcctgccaagcacttaattgctagtatgttgtccaaaaacccagaggatcgtcccagtttggatgacatcattcgacatgacttttttttgcagggcttcactccggacagactgtcttctagctgttgtcatacagttccagatttccacttatcaagcccagctaagaatttctttaagaaagcagctgctgctctttttggtggcaaaaaagacaaagcaagatatattgacacacataatagagtgtctaaagaagatgaagacatctacaagcttaggcatgatttgaaaaagacttcaataactcagcaacccagcaaacacaggacagatgaggagctccagccacctaccaccacagttgccaggtctggaacacccgcagtagaaaacaagcagcagattggggatgctattcggatgatagtcagagggactcttggcagctgtagcagcagcagtgaatgccttgaagacagtaccatgggaagtgttgcagacacagtggcaagggttcttcggggatgtctggaaaacatgccggaagctgattgcattcccaaagagcagctgagcacatcatttcagtgggtcaccaaatgggttgattactctaacaaatatggctttgggtaccagctctcagaccacaccgtcggtgtccttttcaacaatggtgctcacatgagcctccttccagacaaaaaaacagttcactattacgcagagcttggccaatgctcagttttcccagcaacagatgctcctgagcaatttattagtcaagtgacggtgctgaaatacttttctcattacatggaggagaacctcatggatggtggagatctgcctagtgttactgatattcgaagacctcggctctacctccttcagtggctaaaatctgataaggccctaatgatgctctttaatgatggcacctttcaggtgaatttctaccatgatcatacaaaaatcatcatctgtagccaaaatgaagaataccttctcacctacatcaatgaggataggatatctacaactttcaggctgacaactctgctgatgtctggctgttcatcagaattaaaaaatcgaatggaatatgccctgaacatgctcttacaaagatgtaactgaaagacttttcgaatggaccctatgggactcctcttttccactgtgagatctacagggaagccaaaagaatgatctagagtatgttgaagaagatggacatgtggtggtacgaaaacaattcccctgtggcctgctggactgggtggaaccagaacaggctaaggcatacagttcttgactttggacaatccaagagtgaaccagaatgcagttttccttgagatacctgttttaaaaggtttttcagacaattttgcagaaaggtgcattgattcttaaattctctctgttgagagcatttcagccagaggactttggaactgtgaatatacttcctgaaggggagggagaagggaggaagctcccatgttgtttaaaggctgtaattggagcagcttttggctgcgtaactgtgaactatggccatatataattttttttcattaatttttgaagatacttgtggctggaaaagtgcattccttgttaataaactttttatttattacagcccaaagagcagtatttattatcaaaatgtctttttttttatgttgaccattttaaaccgttggcaataaagagtatgaaaacgcca

SEQ ID NO: 98 - DNA, 3846 bp, Homo sapien
acctaacggcattccggaacattccacaagatggcgcccttgctttccaatcttcgggctacgggcggaggacgccttgccaggacgtcgacctcgctctgcaaggttcaggggccgacctcagacagaggctcgctctaggggcatgggcgggggccagacgggcctcgagtgggatcctggcacggttggccgatcggcccgggatcccggctgcgggcccgtgtctgccctagcgcgatgggctcgaatgcccggctccacgaatcccggcctttcacccccacggcctctcggcactgccccagctagacaccagcgagctcgtcacagcgcgggcaggcactgcggggcagctgcagacgagccttgtcatacggccggaggaggcctcgcctgcccgtgcggcgggctccgggcaccctgataccttgacacaggaggccccgggcggccgggaagggctgtgcgggggagggactgcgtctacacccgcgcccgactcgctcgggtcacggcactgccctgccaccaggcggctggggcgggggtgaggccaggcgtccgccctcgcgattctgttttctacgctgaggctcggagccttcgaagaacgggacagcggggcccacggacggctctgaaggccttcccgcggccgcaagagctctcggcggccggcgtttgaggcgcgcggctccgctgggaagcgagacccgggtggcgggacaagacttgcttcccggccacgcgcgctcggccggccgtggggcggggcataggccgtgacgtggtgtcgcgtatcgagtctccgcccccttcccgcctccccgtatataagacttcgccgagcactctcactcgcacaagtggaccggggtgttgggtgctagtcggcaccagaggcaagggtgcgaggaccacggccggctcggacgtgtgaccgcgcctagggggtggcagcgggcagtgcggggcggcaaggcgaccatggagcttttgcggactatcacctaccagccagccgccagcaccaaaatgtgcgagcaggcgctgggcaagggttgcggagcggactcgaagaagaagcggccgccgcagccccccgaggaatcgcagccacctcagtcccaggcgcaagtgcccccggcggcccctcaccaccatcaccaccattcgcactcggggccggagatctcgcggattatcgtcgaccccacgactgggaagcgctactgccggggcaaagtgctgggaaagggtggctttgcaaaatgttacgagatgacagatttgacaaataacaaagtctacgccgcaaaaattattcctcacagcagagtagctaaacctcatcaaagggaaaagattgacaaagaaatagagcttcacagaattcttcatcataagcatgtagtgcagttttaccactacttcgaggacaaagaaaacatttacattctcttggaatactgcagtagaaggaagggtaagtgtcaactcctatttgagaacatttgcttaccccgaattaacatggtattcaaagagtattttatctgggattttagctgtggcagcacttacactgcaaagttaactttcattgctcatcctgcaaagggaaaccagtgattttgataactgttttgacagattctcttttttccttctcctcttcttagtcaatggctcatattttgaaagcaagaaaggtgttgacagagccagaagttcgatactacctcaggcagattgtgtctggactgaaataccttcatgaacaagaaatcttgcacagagatctcaaactagggaacttttttattaatgaagccatggaactaaaagttggggacttcggtctggcagccaggctagaacccttggaacacagaaggagaacgatatgtggtaccccaaattatctctctcctgaagtcctcaacaaacaaggacatggctgtgaatcagacatttgggccctgggctgtgtaatgtatacaatgttactagggaggcccccatttgaaactacaaatctcaaagaaacttataggtgcataagggaagcaaggtatacaatgccgtcctcattgctggctcctgccaagcacttaattgctagtatgttgtccaaaaacccagaggatcgtcccagtttggatgacatcattcgacatgacttttttttgcagggcttcactccggacagactgtcttctagctgttgtcatacagttccagatttccacttatcaagcccagctaagaatttctttaagaaagcagctgctgctctttttggtggcaaaaaagacaaagcaagatatattgacacacataatagagtgtctaaagaagatgaagacatctacaagcttaggcatgatttgaaaaagacttcaataactcagcaacccagcaaacacaggacagatgaggagctccagccacctaccaccacagttgccaggtctggaacacccgcagtagaaaacaagcagcagattggggatgctattcggatgatagtcagagggactcttggcagctgtagcagcagcagtgaatgccttgaagacagtaccatgggaagtgttgcagacacagtggcaagggttcttcggggatgtctggaaaacatgccggaagctgattgcattcccaaagagcagctgagcacatcatttcagtgggtcaccaaatgggttgattactctaacaaatatggctttgggtaccagctctcagaccacaccgtcggtgtccttttcaacaatggtgctcacatgagcctccttccagacaaaaaaacagttcactattacgcagagcttggccaatgctcagttttcccagcaacagatgctcctgagcaatttattagtcaagtgacggtgctgaaatacttttctcattacatggaggagaacctcatggatggtggagatctgcctagtgttactgatattcgaagacctcggctctacctccttcagtggctaaaatctgataaggccctaatgatgctctttaatgatggcacctttcaggtgaatttctaccatgatcatacaaaaatcatcatctgtagccaaaatgaagaataccttctcacctacatcaatgaggataggatatctacaactttcaggctgacaactctgctgatgtctggctgttcatcagaattaaaaaatcgaatggaatatgccctgaacatgctcttacaaagatgtaactgaaagacttttcgaatggaccctatgggactcctcttttccactgtgagatctacagggaagccaaaagaatgatctagagtatgttgaagaagatggacatgtggtggtacgaaaacaattcccctgtggcctgctggactgggtggaaccagaacaggctaaggcatacagttcttgactttggacaatccaagagtgaaccagaatgcagttttccttgagatacctgttttaaaaggtttttcagacaattttgcagaaaggtgcattgattcttaaattctctctgttgagagcatttcagccagaggactttggaactgtgaatatacttcctgaaggggagggagaagggaggaagctcccatgttgtttaaaggctgtaattggagcagcttttggctgcgtaactgtgaactatggccatatataattttttttcattaatttttgaagatacttgtggctggaaaagtgcattccttgttaataaactttttatttattacagcccaaagagcagtatttattatcaaaatgtctttttttttatgttgaccattttaaaccgttggcaataaagagtatgaaaacgcca

SEQ ID NO: 99 - DNA, 1733 bp, Homo sapien
gagccaaagggaagtgctgcgaggtttacaaccagctgcagtggttcgatgggaaggatctttctccaagtggttcctcttgaggggagcatttctgctggctccaggactttggccatctataaagcttggcaatgagaaataagaaaattctcaaggaggacgagctcttgagtgagacccaacaagctgcttttcaccaaattgcaatggagcctttcgaaatcaatggtcttcaaggtcacaagggggccatgggcatgcctggtgcccctggcccgccgggaccacctgctgagaagggagccaagggggctatgggacgagatggagcaacaggcccctcgggaccccaaggcccaccgggagtcaagggagaggcgggcctccaaggaccccagggtgctccagggaagcaaggagccactggcaccccaggaccccaaggagagaagggcagcaaaggcgatgggggtctcattggcccaaaaggggaaactggaactaagggagagaaaggagacctgggtctcccaggaagcaaaggggacaggggcatgaaaggagatgcaggggtcatggggcctcctggagcccaggggagtaaaggtgacttcgggaggccaggcccaccaggtttggctggttttcctggagctaaaggagatcaaggacaacctggactgcagggtgttccgggccctcctggtgcagtgggacacccaggtgccaagggtgagcctggcagtgctggctcccctgggcgagcaggacttccagggagccccgggagtccaggagccacaggcctgaaaggaagcaaaggggacacaggacttcaaggacagcaaggaagaaaaggagaatcaggagttccaggccctgcaggtgtgaagggagaacaggggagcccagggctggcaggtcccaagggagcccctggacaagctggccagaagggagaccagggagtgaaaggatcttctggggagcaaggagtaaagggagaaaaaggtgaaagaggtgaaaactcagtgtccgtcaggattgtcggcagtagtaaccgaggccgggctgaagtttactacagtggtacctgggggacaatttgcgatgacgagtggcaaaattctgatgccattgtcttctgccgcatgctgggttactccaaaggaagggccctgtacaaagtgggagctggcactgggcagatctggctggataatgttcagtgtcggggcacggagagtaccctgtggagctgcaccaagaatagctggggccatcatgactgcagccacgaggaggacgcaggcgtggagtgcagcgtctgacccggaaaccctttcacttctctgctcccgaggtgtcctcgggctcatatgtgggaaggcagaggatctctgaggagttccctggggacaactgagcagcctctggagaggggccattaataaagctcaacatcattgggcaaaaaaagacaaaagagaagggggggccgtgtctagagggttcaggtttaattatagcttgattgaatataatagctctggctgaagcaattcgatcttaagtcttatctgatacctgcacccctcatgcgggcgccgtacccattcgcctatagtggtctatatagacacacaatgcgtagtttaaacttcttattggaaccctgctgtccatatcgtacctcctctcaaacaaaaaggccaaacgataatcaacag

SEQ ID NO: 100 - DNA, 1835 bp, Homo sapien
gagccaaagggaagtgctgcgaggtttacaaccagctgcagtggttcgatgggaaggatctttctccaagtggttcctcttgaggggagcatttctgctggctccaggactttggccatctataaagcttggcaatgagaaataagaaaattctcaaggaggacgagctcttgagtgagacccaacaagctgcttttcaccaaattgcaatggagcctttcgaaatcaatgttccaaagcccaagaggagaaatggggtgaacttctccctagctgtggtggtcatctacctgatcctgctcaccgctggcgctgggctgctggtggtccaaggtcttcaaggtcacaagggggccatgggcatgcctggtgcccctggcccgccgggaccacctgctgagaagggagccaagggggctatgggacgagatggagcaacaggcccctcgggaccccaaggcccaccgggagtcaagggagaggcgggcctccaaggaccccagggtgctccagggaagcaaggagccactggcaccccaggaccccaaggagagaagggcagcaaaggcgatgggggtctcattggcccaaaaggggaaactggaactaagggagagaaaggagacctgggtctcccaggaagcaaaggggacaggggcatgaaaggagatgcaggggtcatggggcctcctggagcccaggggagtaaaggtgacttcgggaggccaggcccaccaggtttggctggttttcctggagctaaaggagatcaaggacaacctggactgcagggtgttccgggccctcctggtgcagtgggacacccaggtgccaagggtgagcctggcagtgctggctcccctgggcgagcaggacttccagggagccccgggagtccaggagccacaggcctgaaaggaagcaaaggggacacaggacttcaaggacagcaaggaagaaaaggagaatcaggagttccaggccctgcaggtgtgaagggagaacaggggagcccagggctggcaggtcccaagggagcccctggacaagctggccagaagggagaccagggagtgaaaggatcttctggggagcaaggagtaaagggagaaaaaggtgaaagaggtgaaaactcagtgtccgtcaggattgtcggcagtagtaaccgaggccgggctgaagtttactacagtggtacctgggggacaatttgcgatgacgagtggcaaaattctgatgccattgtcttctgccgcatgctgggttactccaaaggaagggccctgtacaaagtgggagctggcactgggcagatctggctggataatgttcagtgtcggggcacggagagtaccctgtggagctgcaccaagaatagctggggccatcatgactgcagccacgaggaggacgcaggcgtggagtgcagcgtctgacccggaaaccctttcacttctctgctcccgaggtgtcctcgggctcatatgtgggaaggcagaggatctctgaggagttccctggggacaactgagcagcctctggagaggggccattaataaagctcaacatcattgggcaaaaaaagacaaaagagaagggggggccgtgtctagagggttcaggtttaattatagcttgattgaatataatagctctggctgaagcaattcgatcttaagtcttatctgatacctgcacccctcatgcgggcgccgtacccattcgcctatagtggtctatatagacacacaatgcgtagtttaaacttcttattggaaccctgctgtccatatcgtacctcctctcaaacaaaaaggccaaacgataatcaacag

SEQ ID NO: 101 - protein, 532 aa, Homo sapien
MTSCGPWARASVDSESSWPLIPFILSHSSPAALTPVPPPPAVVPTRFGNADGAACHFPFIFEGRSYSACTTDGRSDGLPWCSTTANYDTDDRFGFCPSERLYTRDGNADGKPCQFPFIFQGQSYSACTTDGRSDGYRWCATTANYDRDKLFGFCPTRADSTVMGGNSAGELCVFPFTFLGKEYSTCTSEGRGDGRLWCATTSNFDSDKKWGFCPDQGYSLFLVAAHEFGHALGLDHSSVPEALMYPMYRFTEGPPLHKDDVNGIRHLYGPRPEPEPRPPTTTTPQPTAPPTVCPTGPPTVHPSERPTAGPTGPPSAGPTGPPTAGPSTATTVPLSPVDDACNVNIFDAIAEIGNQLYLFKDGKYWRFSEGRGSRPQGPFLIADKWPALPRKLDSVFEEPLSKKLFFFSGRQVWVYTGASVLGPRRLDKLGLGADVAQVTGALRSGRGKMLLFSGRRLWRFDVKAQMVDPRSASEVDRMFPGVPLDTHDVFQYREKAYFCQDRFYWRVSSRSELNQVDQVGYVTYDILQCPED

SEQ ID NO: 102 - protein, 666 aa, Homo sapien
MIYDGGRFALREVLYKPAGVMLLTKEPVERSQRTGVPSPATRGPAIPAPIRFPHSLRFYRVFLSQPCPDSPRAALTQQIRSQAASSMDWSRHLRPTSALTMSLWQPLVLVLLVLGCCFAAPRQRQSTLVLFPGDLRTNLTDRQLAEEYLYRYGYTRVAEMRGESKSLGPALLLLQKQLSLPETGELDSATLKAMRTPRCGVPDLGRFQTFEGDLKWHHHNITYWIQNYSEDLPRAVIDDAFARAFALWSAVTPLTFTRVYSRDADIVIQFGVAEHGDGYPFDGKDGLLAHAFPPGPGIQGDAHFDDDELWSLGKGVVVPTRFGNADGAACHFPFIFEGRSYSACTTDGRSDGLPWCSTTANYDTDDRFGFCPSERLYTRDGNADGKPCQFPFIFQGQSYSACTTDGRSDGYRWCATTANYDRDKLFGFCPTRADSTVMGGNSAGELCVFPFTFLGKEYSTCTSEGRGDGRLWCATTSNFDSDKKWGFCPDQGYSLFLVAAHEFGHALGLDHSSVPEALMYPMYRFTEGPPLHKDDVNGIRHLYGPRPEPEPRPPTTTTPQPTAPPTVCPTGPPTVHPSERPTAGPTGPPSAGPTGPPTAGPSTATTVPLSPVDDACNVNIFDAIAEIGNQLYLFKDGCSPGCLWTRTTSSSTERKPISARTASTGA

SEQ ID NO: 103 - protein, 643 aa, Homo sapien
RRSQSERSQRTGVPSPATRGPAIPAPIRFPHSLRFYRVFLSQPCPDSPRAALTQQIRSQAASSMDWSRHLRPTSALTMSLWQPLVLVLLVLGCCFAAPRQRQSTLVLFPGDLRTNLTDRQLAEEYLYRYGYTRVAEMRGESKSLGPALLLLQKQLSLPETGELDSATLKAMRTPRCGVPDLGRFQTFEGDLKWHHHNITYWIQNYSEDLPRAVIDDAFARAFALWSAVTPLTFTRVYSRDADIVIQFGVAEHGDGYPFDGKDGLLAHAFPPGPGIQGDAHFDDDELWSLGKGVVVPTRFGNADGAACHFPFIFEGRSYSACTTDGRSDGLPWCSTTANYDTDDRFGFCPSERLYTRDGNADGKPCQFPFIFQGQSYSACTTDGRSDGYRWCATTANYDRDKLFGFCPTRADSTVMGGNSAGELCVFPFTFLGKEYSTCTSEGRGDGRLWCATTSNFDSDKKWGFCPDQGYSLFLVAAHEFGHALGLDHSSVPEALMYPMYRFTEGPPLHKDDVNGIRHLYGPRPEPEPRPPTTTTPQPTAPPTVCPTGPPTVHPSERPTAGPTGPPSAGPTGPPTAGPSTATTVPLSPVDDACNVNIFDAIAEIGNQLYLFKDGCSPGCLWTRTTSSSTERKPISARTASTGA

SEQ ID NO: 104 - protein, 893 aa, Homo sapien
MIYDGGRFALREVLYKPAGVMLLTKEPVERSQRTGVPSPATRGPAIPAPIRFPHSLRFYRVFLSQPCPDSPRAALTQQIRSQAASSMDWSRHLRPTSALTMSLWQPLVLVLLVLGCCFAAPRQRQSTLVLFPGDLRTNLTDRQLAEEYLYRYGYTRVAEMRGESKSLGPALLLLQKQLSLPETGELDSATLKAMRTPRCGVPDLGRFQTFEGDLKWHHHNITYWIQNYSEDLPRAVIDDAFARAFALWSAVTPLTFTRVYSRDADIVIQFGVAEHGDGYPFDGKDGLLAHAFPPGPGIQGDAHFDDDELWSLGKGVVVPTRFGNADGAACHFPFIFEGRSYSACTTDGRSDGLPWCSTTANYDTDDRFGFCPSESELRGLAEGWGRPPPLMVLGSNSSSATSAVWPAIHPPALWAQFSHLRNDERWDELQTIHGSKNRTHLGVIMCCLRLLPLSHILLAPGLYTRDGNADGKPCQFPFIFQGQSYSACTTDGRSDGYRWCATTANYDRDKLFGFCPTRADSTVMGGNSAGELCVFPFTFLGKEYSTCTSEGRGDGRLWCATTSNFDSDKKWGFCPDQGYSLFLVAAHEFGHALGLDHSSVPEALMYPMYRFTEGPPLHKDDVNGIRHLYGPRPEPEPRPPTTTTPQPTAPPTVCPTGPPTVHPSERPTAGPTGPPSAGPTGPPTAGPSTATTVPLSPVDDACNVNIFDAIAEIGNQLYLFKDGKYWRFSEGRGSRPQGPFLIADKWPALPRKLDSVFEEPLSKKLFFFSGRQVWVYTGASVLGPRRLDKLGLGADVAQVTGALRSGRGKMLLFSGRRLWRFDVKAQMVDPRSASEVDRMFPGVPLDTHDVFQYREKAYFCQDRFYWRVSSRSELNQVDQVGYVTYDILQCPED

SEQ ID NO: 105 - protein, 517 aa, Homo sapien
VRGLAEGWGRPPPLMVLGSNSSSATSAVWPAIHPPALWAQFSHLRNDERWDELQTIHGSKNRTHLGVIMCCLRLLPLSHILLAPGLYTRDGNADGKPCQFPFIFQGQSYSACTTDGRSDGYRWCATTANYDRDKLFGFCPTRADSTVMGGNSAGELCVFPFTFLGKEYSTCTSEGRGDGRLWCATTSNFDSDKKWGFCPDQGYSLFLVAAHEFGHALGLDHSSVPEALMYPMYRFTEGPPLHKDDVNGIRHLYGPRPEPEPRPPTTTTPQPTAPPTVCPTGPPTVHPSERPTAGPTGPPSAGPTGPPTAGPSTATTVPLSPVDDACNVNIFDAIAEIGNQLYLFKDGKYWRFSEGRGSRPQGPFLIADKWPALPRKLDSVFEEPLSKKLFFFSGRQVWVYTGASVLGPRRLDKLGLGADVAQVTGALRSGRGKMLLFSGRRLWRFDVKAQMVDPRSASEVDRMFPGVPLDTHDVFQYREKAYFCQDRFYWRVSSRSELNQVDQVGYVTYDILQCPED

SEQ ID NO: 106 - protein, 628 aa, Homo sapien
MIYDGGRFALREVLYKPAGVMLLTKEPVERSQRTGVPSPATRGPAIPAPIRFPHSLRFYRVFLSQPCPDSPRAALTQQIRSQAASSMDWSRHLRPTSALTMSLWQPLVLVLLVLGCCFAAPRQRQSTLVLFPGDLRTNLTDRQLAEEYLYRYGYTRVAEMRGESKSLGPALLLLQKQLSLPETGELDSATLKAMRTPRCGVPDLGRFQTFEGDLKWHHHNITYWIQNYSEDLPRAVIDDAFARAFALWSAVTPLTFTRVYSRDADIVIQFGVAEHGDGYPFDGKDGLLAHAFPPGPGIQGDAHFDDDELWSLGKGVVVPTRFGNADGAACHFPFIFEGRSYSACTTDGRSDGLPWCSTTANYDTDDRFGFCPSERLYTRDGNADGKPCQFPFIFQGQSYSACTTDGRSDGYRWCATTANYDRDKLFGFCPTRADSTVMGGNSAGELCVFPFTFLGKEYSTCTSEGRGDGRLWCATTSNFDSDKKWGFCPDQGYSLFLVAAHEFGHALGLDHSSVPEALMYPMYRFTEGPPLHKDDVNGIRHLYGPRPEPEPRPPTTTTPQPTAPPTVCPTGPPTVHPSERPTAGPTGPPSAGPTGPPTAGPSTATTVPLSPVDDACCCSAGGASGGST

SEQ ID NO: 107 - protein, 605 aa, Homo sapien
RRSQSERSQRTGVPSPATRGPAIPAPIRFPHSLRFYRVFLSQPCPDSPRAALTQQIRSQAASSMDWSRHLRPTSALTMSLWQPLVLVLLVLGCCFAAPRQRQSTLVLFPGDLRTNLTDRQLAEEYLYRYGYTRVAEMRGESKSLGPALLLLQKQLSLPETGELDSATLKAMRTPRCGVPDLGRFQTFEGDLKWHHHNITYWIQNYSEDLPRAVIDDAFARAFALWSAVTPLTFTRVYSRDADIVIQFGVAEHGDGYPFDGKDGLLAHAFPPGPGIQGDAHFDDDELWSLGKGVVVPTRFGNADGAACHFPFIFEGRSYSACTTDGRSDGLPWCSTTANYDTDDRFGFCPSERLYTRDGNADGKPCQFPFIFQGQSYSACTTDGRSDGYRWCATTANYDRDKLFGFCPTRADSTVMGGNSAGELCVFPFTFLGKEYSTCTSEGRGDGRLWCATTSNFDSDKKWGFCPDQGYSLFLVAAHEFGHALGLDHSSVPEALMYPMYRFTEGPPLHKDDVNGIRHLYGPRPEPEPRPPTTTTPQPTAPPTVCPTGPPTVHPSERPTAGPTGPPSAGPTGPPTAGPSTATTVPLSPVDDACCCSAGGASGGST

SEQ ID NO: 108 - protein, 503 aa, Homo sapien
MVLGSNSSSATSAVWPAIHPPALWAQFSHLRNDERWDELQTIHGSKNRTHLGVIMCCLRLLPLSHILLAPGLYTRDGNADGKPCQFPFIFQGQSYSACTTDGRSDGYRWCATTANYDRDKLFGFCPTRADSTVMGGNSAGELCVFPFTFLGKEYSTCTSEGRGDGRLWCATTSNFDSDKKWGFCPDQGYSLFLVAAHEFGHALGLDHSSVPEALMYPMYRFTEGPPLHKDDVNGIRHLYGPRPEPEPRPPTTTTPQPTAPPTVCPTGPPTVHPSERPTAGPTGPPSAGPTGPPTAGPSTATTVPLSPVDDACNVNIFDAIAEIGNQLYLFKDGKYWRFSEGRGSRPQGPFLIADKWPALPRKLDSVFEEPLSKKLFFFSGRQVWVYTGASVLGPRRLDKLGLGADVAQVTGALRSGRGKMLLFSGRRLWRFDVKAQMVDPRSASEVDRMFPGVPLDTHDVFQYREKAYFCQDRFYWRVSSRSELNQVDQVGYVTYDILQCPED

SEQ ID NO: 109 - protein, 838 aa, Homo sapien
MIYDGGRFALREVLYKPAGVMLLTKEPVERSQRTGVPSPATRGPAIPAPIRFPHSLRFYRVFLSQPCPDSPRAALTQQIRSQAASSMDWSRHLRPTSALTMSLWQPLVLVLLVLGCCFAAPRQRQSTLVLFPGDLRTNLTDRQLAEEYLYRYGYTRVAEMRGESKSLGPALLLLQKQLSLPETGELDSATLKAMRTPRCGVPDLGRFQTFEGDLKWHHHNITYWIQNYSEDLPRAVIDDAFARAFALWSAVTPLTFTRVYSRDADIVIQFGVAEHGDGYPFDGKDGLLAHAFPPGPGIQGDAHFDDDELWSLGKGVGEILSPPGPWIPFILSHSSPAALTPVPPPPAVVPTRFGNADGAACHFPFIFEGRSYSACTTDGRSDGLPWCSTTANYDTDDRFGFCPSERLYTRDGNADGKPCQFPFIFQGQSYSACTTDGRSDGYRWCATTANYDRDKLFGFCPTRADSTVMGGNSAGELCVFPFTFLGKEYSTCTSEGRGDGRLWCATTSNFDSDKKWGFCPDQGYSLFLVAAHEFGHALGLDHSSVPEALMYPMYRFTEGPPLHKDDVNGIRHLYGPRPEPEPRPPTTTTPQPTAPPTVCPTGPPTVHPSERPTAGPTGPPSAGPTGPPTAGPSTATTVPLSPVDDACNVNIFDAIAEIGNQLYLFKDGKYWRFSEGRGSRPQGPFLIADKWPALPRKLDSVFEEPLSKKLFFFSGRQVWVYTGASVLGPRRLDKLGLGADVAQVTGALRSGRGKMLLFSGRRLWRFDVKAQMVDPRSASEVDRMFPGVPLDTHDVFQYREKAYFCQDRFYWRVSSRSELNQVDQVGYVTYDILQCPED

SEQ ID NO: 110 - protein, 520 aa, Homo sapien
DSESSWPLIPFILSHSSPAALTPVPPPPAVVPTRFGNADGAACHFPFIFEGRSYSACTTDGRSDGLPWCSTTANYDTDDRFGFCPSERLYTRDGNADGKPCQFPFIFQGQSYSACTTDGRSDGYRWCATTANYDRDKLFGFCPTRADSTVMGGNSAGELCVFPFTFLGKEYSTCTSEGRGDGRLWCATTSNFDSDKKWGFCPDQGYSLFLVAAHEFGHALGLDHSSVPEALMYPMYRFTEGPPLHKDDVNGIRHLYGPRPEPEPRPPTTTTPQPTAPPTVCPTGPPTVHPSERPTAGPTGPPSAGPTGPPTAGPSTATTVPLSPVDDACNVNIFDAIAEIGNQLYLFKDGKYWRFSEGRGSRPQGPFLIADKWPALPRKLDSVFEEPLSKKLFFFSGRQVWVYTGASVLGPRRLDKLGLGADVAQVTGALRSGRGKMLLFSGRRLWRFDVKAQMVDPRSASEVDRMFPGVPLDTHDVFQYREKAYFCQDRFYWRVSSRSELNQVDQVGYVTYDILQCPED

SEQ ID NO: 111 - protein, 807 aa, Homo sapien
MIYDGGRFALREVLYKPAGVMLLTKEPVERSQRTGVPSPATRGPAIPAPIRFPHSLRFYRVFLSQPCPDSPRAALTQQIRSQAASSMDWSRHLRPTSALTMSLWQPLVLVLLVLGCCFAAPRQRQSTLVLFPGDLRTNLTDRQLAEEYLYRYGYTRVAEMRGESKSLGPALLLLQKQLSLPETGELDSATLKAMRTPRCGVPDLGRFQTFEGDLKWHHHNITYWIQNYSEDLPRAVIDDAFARAFALWSAVTPLTFTRVYSRDADIVIQFGVAEHGDGYPFDGKDGLLAHAFPPGPGIQGDAHFDDDELWSLGKGVVVPTRFGNADGAACHFPFIFEGRSYSACTTDGRSDGLPWCSTTANYDTDDRFGFCPSERLYTRDGNADGKPCQFPFIFQGQSYSACTTDGRSDGYRWCATTANYDRDKLFGFCPTRADSTVMGGNSAGELCVFPFTFLGKEYSTCTSEGRGDGRLWCATTSNFDSDKKWGFCPDQGYSLFLVAAHEFGHALGLDHSSVPEALMYPMYRFTEGPPLHKDDVNGIRHLYGPRPEPEPRPPTTTTPQPTAPPTVCPTGPPTVHPSERPTAGPTGPPSAGPTGPPTAGPSTATTVPLSPVDDACNVNIFDAIAEIGNQLYLFKDGKYWRFSEGRGSRPQGPFLIADKWPALPRKLDSVFEEPLSKKLFFFSGRQVWVYTGASVLGPRRLDKLGLGADVAQVTGALRSGRGKMLLFSGRRLWRFDVKAQMVDPRSASEVDRMFPGVPLDTHDVFQYREKAYFCQDRFYWRVSSRSELNQVDQVGYVTYDILQCPED

SEQ ID NO: 112 - protein, 784 aa, Homo sapien
RRSQSERSQRTGVPSPATRGPAIPAPIRFPHSLRFYRVFLSQPCPDSPRAALTQQIRSQAASSMDWSRHLRPTSALTMSLWQPLVLVLLVLGCCFAAPRQRQSTLVLFPGDLRTNLTDRQLAEEYLYRYGYTRVAEMRGESKSLGPALLLLQKQLSLPETGELDSATLKAMRTPRCGVPDLGRFQTFEGDLKWHHHNITYWIQNYSEDLPRAVIDDAFARAFALWSAVTPLTFTRVYSRDADIVIQFGVAEHGDGYPFDGKDGLLAHAFPPGPGIQGDAHFDDDELWSLGKGVVVPTRFGNADGAACHFPFIFEGRSYSACTTDGRSDGLPWCSTTANYDTDDRFGFCPSERLYTRDGNADGKPCQFPFIFQGQSYSACTTDGRSDGYRWCATTANYDRDKLFGFCPTRADSTVMGGNSAGELCVFPFTFLGKEYSTCTSEGRGDGRLWCATTSNFDSDKKWGFCPDQGYSLFLVAAHEFGHALGLDHSSVPEALMYPMYRFTEGPPLHKDDVNGIRHLYGPRPEPEPRPPTTTTPQPTAPPTVCPTGPPTVHPSERPTAGPTGPPSAGPTGPPTAGPSTATTVPLSPVDDACNVNIFDAIAEIGNQLYLFKDGKYWRFSEGRGSRPQGPFLIADKWPALPRKLDSVFEEPLSKKLFFFSGRQVWVYTGASVLGPRRLDKLGLGADVAQVTGALRSGRGKMLLFSGRRLWRFDVKAQMVDPRSASEVDRMFPGVPLDTHDVFQYREKAYFCQDRFYWRVSSRSELNQVDQVGYVTYDILQCPED

SEQ ID NO: 113 - protein, 76 aa, Homo sapien
MERLKGMVQNHQFSTLRISKSTMDFIRFEGEVENKSLEKAYFCQDRFYWRVSSRSELNQVDQVGYVTYDILQCPED

SEQ ID NO: 114 - protein, 96 aa, Homo sapien
IPRAAPSAEAAGEVHLQLGGDGEAEGHGAEPPVLHAAYFQEHHGLHPLRGGGGEQEPEKAYFCQDRFYWRVSSRSELNQVDQVGYVTYDILQCPED

SEQ ID NO: 115 - protein, 460 aa, Homo sapien
MIYDGGRFALREVLYKPAGVMLLTKEPVERSQRTGVPSPATRGPAIPAPIRFPHSLRFYRVFLSQPCPDSPRAALTQQIRSQAASSMDWSRHLRPTSALTMSLWQPLVLVLLVLGCCFAAPRQRQSTLVLFPGDLRTNLTDRQLAEEYLYRYGYTRVAEMRGESKSLGPALLLLQKQLSLPETGELDSATLKAMRTPRCGVPDLGRFQTFEGDLKWHHHNITYWIQNYSEDLPRAVIDDAFARAFALWSAVTPLTFTRVYSRDADIVIQFGVAEHGDGYPFDGKDGLLAHAFPPGPGIQGDAHFDDDELWSLGKGVVVPTRFGNADGAACHFPFIFEGRSYSACTTDGRSDGLPWCSTTANYDTDDRFGFCPSERLYTRDGNADGKPCQFPFIFQGQSYSACTTDGRSDGYRWCATTANYDRDKLFGFCPTRADSTVMGGNSAGELCVFPFTFLGKESSP

SEQ ID NO: 116 - protein, 437 aa, Homo sapien
RRSQSERSQRTGVPSPATRGPAIPAPIRFPHSLRFYRVFLSQPCPDSPRAALTQQIRSQAASSMDWSRHLRPTSALTMSLWQPLVLVLLVLGCCFAAPRQRQSTLVLFPGDLRTNLTDRQLAEEYLYRYGYTRVAEMRGESKSLGPALLLLQKQLSLPETGELDSATLKAMRTPRCGVPDLGRFQTFEGDLKWHHHNITYWIQNYSEDLPRAVIDDAFARAFALWSAVTPLTFTRVYSRDADIVIQFGVAEHGDGYPFDGKDGLLAHAFPPGPGIQGDAHFDDDELWSLGKGVVVPTRFGNADGAACHFPFIFEGRSYSACTTDGRSDGLPWCSTTANYDTDDRFGFCPSERLYTRDGNADGKPCQFPFIFQGQSYSACTTDGRSDGYRWCATTANYDRDKLFGFCPTRADSTVMGGNSAGELCVFPFTFLGKESSP

SEQ ID NO: 117 - protein, 916 aa, Homo sapien
MIYDGGRFALREVLYKPAGVMLLTKEPVERSQRTGVPSPATRGPAIPAPIRFPHSLRFYRVFLSQPCPDSPRAALTQQIRSQAASSMDWSRHLRPTSALTMSLWQPLVLVLLVLGCCFAAPRQRQSTLVLFPGDLRTNLTDRQLAEEYLYRYGYTRVAEMRGESKSLGPALLLLQKQLSLPETGELDSATLKAMRTPRCGVPDLGRFQTFEGDLKWHHHNITYWIQNYSEDLPRAVIDDAFARAFALWSAVTPLTFTRVYSRDADIVIQFGVAEHGDGYPFDGKDGLLAHAFPPGPGIQGDAHFDDDELWSLGKGVVVPTRFGNADGAACHFPFIFEGRSYSACTTDGRSDGLPWCSTTANYDTDDRFGFCPSERLYTRDGNADGKPCQFPFIFQGQSYSACTTDGRSDGYRWCATTANYDRDKLFGFCPTRADSTVMGGNSAGELCVFPFTFLGKEYSTCTSEGRGDGRLWCATTSNFDSDKKWGFCPDQGYSLFLVAAHEFGHALGLDHSSVPEALMYPMYRFTEGPPLHKDDVNGIRHLYGPRPEPEPRPPTTTTPQPTAPPTVCPTGPPTVHPSERPTAGPTGPPSAGPTGPPTAGPSTATTVPLSPVDDACNVNIFDAIAEIGNQLYLFKDGKYWRFSEGRGSRPQGPFLIADKWPALPRKLDSVFEEPLSKKLFFFSGWLPTFPPPPGQSPSVKEAQETIDNPRNVLCVLEKYAPWRTQFSKRRGGWVSAPSSPRPRVALPSASAPGLQGLRARGLGKASPESPSSRSRSTCSLCAPKPTGPSSPAGRQVWVYTGASVLGPRRLDKLGLGADVAQVTGALRSGRGKMLLFSGRRLWRFDVKAQMVDPRSASEVDRMFPGVPLDTHDVFQYREKAYFCQDRFYWRVSSRSELNQVDQVGYVTYDILQCPED

SEQ ID NO: 118 - protein, 661 aa, Homo sapien
RRSQSERSQRTGVPSPATRGPAIPAPIRFPHSLRFYRVFLSQPCPDSPRAALTQQIRSQAASSMDWSRHLRPTSALTMSLWQPLVLVLLVLGCCFAAPRQRQSTLVLFPGDLRTNLTDRQLAEEYLYRYGYTRVAEMRGESKSLGPALLLLQKQLSLPETGELDSATLKAMRTPRCGVPDLGRFQTFEGDLKWHHHNITYWIQNYSEDLPRAVIDDAFARAFALWSAVTPLTFTRVYSRDADIVIQFGVAEHGDGYPFDGKDGLLAHAFPPGPGIQGDAHFDDDELWSLGKGVVVPTRFGNADGAACHFPFIFEGRSYSACTTDGRSDGLPWCSTTANYDTDDRFGFCPSERLYTRDGNADGKPCQFPFIFQGQSYSACTTDGRSDGYRWCATTANYDRDKLFGFCPTRADSTVMGGNSAGELCVFPFTFLGKEYSTCTSEGRGDGRLWCATTSNFDSDKKWGFCPDQGYSLFLVAAHEFGHALGLDHSSVPEALMYPMYRFTEGPPLHKDDVNGIRHLYGPRPEPEPRPPTTTTPQPTAPPTVCPTGPPTVHPSERPTAGPTGPPSAGPTGPPTAGPSTATTVPLSPVDDACNVNIFDAIAEIGNQLYLFKDGKYWRFSEGRGSRPQGPFLIADKWPALPRKLDSVFEEPLSKKLFFFSG

SEQ ID NO: 119 - protein, 618 aa, Homo sapien
MIYDGGRFALREVLYKPAGVMLLTKEPVERSQRTGVPSPATRGPAIPAPIRFPHSLRFYRVFLSQPCPDSPRAALTQQIRSQAASSMDWSRHLRPTSALTMSLWQPLVLVLLVLGCCFAAPRQRQSTLVLFPGDLRTNLTDRQLAEEYLYRYGYTRVAEMRGESKSLGPALLLLQKQLSLPETGELDSATLKAMRTPRCGVPDLGRFQTFEGDLKWHHHNITYWIQNYSEDLPRAVIDDAFARAFALWSAVTPLTFTRVYSRDADIVIQFGVAEHGDGYPFDGKDGLLAHAFPPGPGIQGDAHFDDDELWSLGKGVVVPTRFGNADGAACHFPFIFEGRSYSACTTDGRSDGLPWCSTTANYDTDDRFGFCPSERLYTRDGNADGKPCQFPFIFQGQSYSACTTDGRSDGYRWCATTANYDRDKLFGFCPTRADSTVMGGNSAGELCVFPFTFLGKEYSTCTSEGRGDGRLWCATTSNFDSDKKWGFCPDQGYSLFLVAAHEFGHALGLDHSSVPEALMYPMYRFTEGPPLHKDDVNGIRHLYGPRPEPEPRPPTTTTPQPTAMFPGVPLDTHDVFQYREKAYFCQDRFYWRVSSRSELNQVDQVGYVTYDILQCPED

SEQ ID NO: 120 - protein, 595 aa, Homo sapien
RRSQSERSQRTGVPSPATRGPAIPAPIRFPHSLRFYRVFLSQPCPDSPRAALTQQIRSQAASSMDWSRHLRPTSALTMSLWQPLVLVLLVLGCCFAAPRQRQSTLVLFPGDLRTNLTDRQLAEEYLYRYGYTRVAEMRGESKSLGPALLLLQKQLSLPETGELDSATLKAMRTPRCGVPDLGRFQTFEGDLKWHHHNITYWIQNYSEDLPRAVIDDAFARAFALWSAVTPLTFTRVYSRDADIVIQFGVAEHGDGYPFDGKDGLLAHAFPPGPGIQGDAHFDDDELWSLGKGVVVPTRFGNADGAACHFPFIFEGRSYSACTTDGRSDGLPWCSTTANYDTDDRFGFCPSERLYTRDGNADGKPCQFPFIFQGQSYSACTTDGRSDGYRWCATTANYDRDKLFGFCPTRADSTVMGGNSAGELCVFPFTFLGKEYSTCTSEGRGDGRLWCATTSNFDSDKKWGFCPDQGYSLFLVAAHEFGHALGLDHSSVPEALMYPMYRFTEGPPLHKDDVNGIRHLYGPRPEPEPRPPTTTTPQPTAMFPGVPLDTHDVFQYREKAYFCQDRFYWRVSSRSELNQVDQVGYVTYDILQCPED

SEQ ID NO: 121 - protein, 71 aa, Homo sapien
MVLLRVLILLLSWAAGMGDRDFDDGVLGLAWVGAPSGSSGGICEKSKLYSDVPTMGKLHSKEKPIKSSSPN

SEQ ID NO: 122 - protein, 117 aa, Homo sapien
VSKEGGREEGTSKGRKAGKGGRKRTRGREVPVLEELGALPAPEVEREGGASPFLLPGEVPASRGGSGPSPFSFSLRIDVLLLTREEAAAAAAAAEDGVAESVNSAPLLGGGDGRPRF

SEQ ID NO: 123 - protein, 63 aa, Homo sapien
AAAYYYYIRGRVDLVAGTGIGKQPPPFPTLLLRGPRVPSALSLLLLQDKVIPKAPATLNYVSL

SEQ ID NO: 124 - protein, 57 aa, Homo sapien
RPPTTTKFAAASIWWPARALGNSLLLSQPCFLGAPVSRLLSASSSCRIKSSPRLQLL

SEQ ID NO: 125 - protein, 969 aa, Homo sapien
MENPSPAAALGKALCALLLATLGAAGQPLGGESICSARAPAKYSITFTGKWSQTAFPKQYPLFRPPAQWSSLLGAAHSSDYSMWRKNQYVSNGLRDFAERGEAWALMKEIEAAGEALQSVHEVFSAPAVPSGTGQTSAELEVQRRHSLVSFVVRIVPSPDWFVGVDSLDLCDGDRWREQAALDLYPYDAGTDSGFTFSSPNFATIPQDTVTEVSGHPACARAAMAPAVGTGLGPGCTLASQPRTAACGFCVEEALLLAPAVSKGVQPSHTLPTRGHSTAGRTAGRASRGGCPFLASVSSPCSVGWLRGVHGTLSPTVVQRARWTLGSGPSEAIRIPEGGLLGPQANPLLPPQITSSSPSHPANSFYYPRLKALPPIARVTLLRLRQSPRAFIPPAPVLPSRDNEIVDSASGNGHTGHMGHTAAPNPATGRPPNPNQGSEKFQVGIRSAYCKMVPRRFRILLIHTLKMDSCTLFAVESILQGHSPEERMKGGSRQYLRDSVLSDTHPQVTCVSQLTRKLARMALCGHRVTAMLQGTCGGLGTQPPHSSGLCSQAPWPGAGQVLMSILLALPGTCWTGQAGNAGAEWQFPPYSAGWQPLASRSACGLERIAGSWVRACWLWVSGSHLIWVWDSQCRPQTTADFRLSRGGTGAHQPGHGPRRPPPSMLLAGVEAGTGPPHTCPPSHVVGTDVVLRSSSNYKLTVSRPWKQGPGQVRQEAAWLAGTTPQTETVPSPGSLLIWDELGLPVPASVLPLPSAGLGSSLICPRGCPIPSRCPRATYPTGRRASTVRGVQLVWREEPLVGRGSREVRFAPHLGALGHSGQGSTWPVPWARRGIKSAVAKQKQYCRGRVGRDCAMSSEQEAGHGEKGGRRTEPAVPAEGPEWAVGTEHRPPPTRVSPVTSGFPRAEAGMGMWRLAPRRLRQVHAKPAWLSSGFLLTRWMPVPRPPDRALQHWRGLWWGPRCRTGTASAH

SEQ ID NO: 126 - protein, 504 aa, Homo sapien
RCDSCTLFAVESILQGHSPEERMKGGSRQYLRDSVLSDTHPQVTCVSQLTRKLARMALCGHRVTAMLQGTCGGLGTQPPHSSGLCSQAPWPGAGQVLMSILLALPGTCWTGQAGNAGAEWQFPPYSAGWQPLASRSACGLERIAGSWVRACWLWVSGSHLIWVWDSQCRPQTTADFRLSRGGTGAHQPGHGPRRPPPSMLLAGVEAGTGPPHTCPPSHVVGTDVVLRSSSNYKLTVSRPWKQGPGQVRQEAAWLAGTTPQTETVPSPGSLLIWDELGLPVPASVLPLPSAGLGSSLICPRGCPIPSRCPRATYPTGRRASTVRGVQLVWREEPLVGRGSREVRFAPHLGALGHSGQGSTWPVPWARRGIKSAVAKQKQYCRGRVGRDCAMSSEQEAGHGEKGGRRTEPAVPAEGPEWAVGTEHRPPPTRVSPVTSGFPRAEAGMGMWRLAPRRLRQVHAKPAWLSSGFLLTRWMPVPRPPDRALQHWRGLWWGPRCRTGTASAH

SEQ ID NO: 127 - protein, 887 aa, Homo sapien
MWRKNQYVSNGLRDFAERGEAWALMKEIEAAGEALQSVHEVFSAPAVPSGTGQTSAELEVQRRHSLVSFVVRIVPSPDWFVGVDSLDLCDGDRWREQAALDLYPYDAGTDSGFTFSSPNFATIPQDTVTEVSGHPACARAAMAPAVGTGLGPGCTLASQPRTAACGFCVEEALLLAPAVSKGVQPSHTLPTRGHSTAGRTAGRASRGGCPFLASVSSPCSVGWLRGVHGTLSPTVVQRARWTLGSGPSEAIRIPEGGLLGPQANPLLPPQITSSSPSHPANSFYYPRLKALPPIARVTLLRLRQSPRAFIPPAPVLPSRDNEIVDSASGNGHTGHMGHTAAPNPATGRPPNPNQGSEKFQVGIRSAYCKMVPRRFRILLIHTLKMDSCTLFAVESILQGHSPEERMKGGSRQYLRDSVLSDTHPQVTCVSQLTRKLARMALCGHRVTAMLQGTCGGLGTQPPHSSGLCSQAPWPGAGQVLMSILLALPGTCWTGQAGNAGAEWQFPPYSAGWQPLASRSACGLERIAGSWVRACWLWVSGSHLIWVWDSQCRPQTTADFRLSRGGTGAHQPGHGPRRPPPSMLLAGVEAGTGPPHTCPPSHVVGTDVVLRSSSNYKLTVSRPWKQGPGQVRQEAAWLAGTTPQTETVPSPGSLLIWDELGLPVPASVLPLPSAGLGSSLICPRGCPIPSRCPRATYPTGRRASTVRGVQLVWREEPLVGRGSREVRFAPHLGALGHSGQGSTWPVPWARRGIKSAVAKQKQYCRGRVGRDCAMSSEQEAGHGEKGGRRTEPAVPAEGPEWAVGTEHRPPPTRVSPVTSGFPRAEAGMGMWRLAPRRLRQVHAKPAWLSSGFLLTRWMPVPRPPDRALQHWRGLWWGPRCRTGTASAH

SEQ ID NO: 128 - protein, 504 aa, Homo sapien; identical to SEQ ID NO: 126

SEQ ID NO: 129 - protein, 887 aa, Homo sapien; identical to SEQ ID NO: 127

SEQ ID NO: 130 - protein, 504 aa, Homo sapien; identical to SEQ ID NO: 126

SEQ ID NO: 131 - protein, 887 aa, Homo sapien
MWRKNQYVSNGLRDFAERGEAWALMKEIEAAGEALQSVHEVFSAPAVPSGTGQTSAELEVQRRHSLVSFVVRIVPSPDWFVGVDSLDLCDGDRWREQAALDLYPYDAGTDSGFTFSSPNFATIPQDTVTEVSGHPACARAAMAPAVGTGLGPGCTLASQPRTAACGFCVEEALLLAPAVSKGVQPSHTLPTRGHSTAGRTAGRASRGGCPFLASVSSPCSVGWLRGVHGTLSPTVVQRARWTLGSGPSEAIRIPEGGLLGPQANPLLPPQITSSSPSHPANSFYYPRLKALPPIARVTLLRLRQSPRAFIPPAPVLPSRDNEIVDSASGNGHTGHMGHTAAPNPATGRPPNPNLGSEKFQVGIRSAYCKMVPRRFRILLIHTLKMDSCTLFAVESILQGHSPEERMKGGSRQYLRDSVLSDTHPQVTCVSQLTRKLARMALCGHRVTAMLQGTCGGLGTQPPHSSGLCSQAPWPGAGQVLMSILLALPGTCWTGQAGNAGAEWQFPPYSAGWQPLASRSACGLERIAGSWVRACWLWVSGSHLIWVWDSQCRPQTTADFRLSRGGTGAHQPGHGPRRPPPSMLLAGVEAGTGPPHTCPPSHVVGTDVVLRSSSNYKLTVSRPWKQGPGQVRQEAAWLAGTTPQTETVPSPGSLLIWDELGLPVPASVLPLPSAGLGSSLICPRGCPIPSRCPRATYPTGRRASTVRGVQLVWREEPLVGRGSREVRFAPHLGALGHSGQGSTWPVPWARRGIKSAVAKQKQYCRGRVGRDCAMSSEQEAGHGEKGGRRTEPAVPAEGPEWAVGTEHRPPPTRVSPVTSGFPRAEAGMGMWRLAPRRLRQVHAKPAWLSSGFLLTRWMPVPRPPDRALQHWRGLWWGPRCRTGTASAH

SEQ ID NO: 132 - protein, 504 aa, Homo sapien; identical to SEQ ID NO: 126

SEQ ID NO: 133 - protein, 471 aa, Homo sapien
MENPSPAAALGKALCALLLATLGAAGQPLGGESICSARAPAKYSITFTGKWSQTAFPKQYPLFRPPAQWSSLLGAAHSSDYSMWRKNQYVSNGLRDFAERGEAWALMKEIEAAGEALQSVHEVFSAPAVPSGTGQTSAELEVQRRHSLVSFVVRIVPSPDWFVGVDSLDLCDGDRWREQAALDLYPYDAGTDSGFTFSSPNFATIPQDTVTEVSGHPACARAAMAPAVGTGLGPGCTLASQPRTAACGFCVEEALLLAPAVSKGVQPSHTLPTRGHSTAGRTAGRASRGGCPFLASVSSPCSVGWLRGVHGTLSPTVVQRARWTLGSGPSEAIRIPEGGLLGPQANPLLPPQITSSSPSHPANSFYYPRLKALPPIARVTLLRLRQSPRAFIPPAPVLPSRDNEIVDSASVPETPLDCEVSLWSSWGLCGGHCGRLGTKSRTRYVRVQPANNGSPCPELEEEAECVPDNCV

SEQ ID NO: 134 - protein, 458 aa, Homo sapien
  MISC_FEATURE (397)..(397): X=any amino acid
  MISC_FEATURE (427)..(427): X=any amino acid
GGIGRGDKERGAAALPGEEGDPTRGRSLGRASWESGSPRRPRSPFSSFLPRPICLSLEARPCSIEDRRNWSLIGRPGAPASGLNRSSGLWLGPDRCRPRSRCSCRVMENPSPAAALGKALCALLLATLGAAGQPLGGESICSARAPAKYSITFTGKWSQTAFPKQYPLFRPPAQWSSLLGAAHSSDYSMWRKNQYVSNGLRDFAERGEAWALMKEIEAAGEALQSVHEVFSAPAVPSGTGQTSAELEVQRRHSLVSFVVRIVPSPDWFVGVDSLDLCDGDRWREQAALDLYPYDAGTDSGFTFSSPNFATIPQDTVTEVSGHPACARAAMAPAVGTGLGPGCTLASQPRTAACGFCVEEALLLAPAVSKGVQPSHTLPTRGHSTAGRTAGRASRGGXPFLASVSSPCSVGWLRGVHGTLSPTVVQRXRWTLGSGPSEAIRIPEGGLLGPQANLFFLPR

SEQ ID NO: 135 - protein, 58 aa, Homo sapien
KALLRRFRDPHQRNGRRGVRSPVRLRATRGNGQVFTSLSFIVQGPGSHVVADTSDLVL

SEQ ID NO: 136 - protein, 79 aa, Homo sapien
AKLSCGASETPISGMDGAGLDRPCACERPGVTGRFSLIVLHRPGAWLPRGCRYLRPGALGCAEPTLPRAHPSGGHLRSE

SEQ ID NO: 137 - protein, 118 aa, Homo sapien
MASRSMRLLLLLSCLAKTGVLGDIIMRPSCAPGWFYHKSNCYGYFRKLRNWSDAELECQSYGNGAHLASILSLKEASTIAEYISGYQRSQPIWIGLHDPQTSHSTPACFSFGHRKVYQ

SEQ ID NO: 138 - protein, 533 aa, Homo sapien
MAYNMTFFPNLMGHYDQSIAAVEMEHFLPLANLECSPNIETFLCKAFVPTCIEQIHVVPPCRKLCEKVYSDCKKLIDTFGIRWPEELECDRLQYCDETVPVTFDPHTEFLGPQKKTEQVQRDIGFWCPRHLKTSGGQGYKFLGIDQCAPPCPNMYFKSDELEFAKSFIGTVSIFCLCATLFTFLTFLIDVRRFRYPERPIIYYSVCYSIVSLMYFIGFLLGDSTACNKADEKLELGDTVVLGSQNKACTVLFMLLYFFTMAGTVWWVILTITWFLAAGRKWSCEAIEQKAVWFHAVAWGTPGFLTVMLLAMNKVEGDNISGVCFVGLYDLDASRYFVLLPLCLCVFVGLSLLLAGIISLNHVRQVIQHDGRNQEKLKKFMIRIGVFSGLYLVPLVTLLGCYVYEQVNRITWEITWVSDHCRQYHIPCPYQAKAKARPELALFMIKYLMTLIVGISAVFWVGSKKTCTEWAGFFKRNRKRDPISESRRVLQGLVQRVILLTLAWHRATICRSPVLQNQAASKVPHLCLFTRFQE

SEQ ID NO: 139 - protein, 600 aa, Homo sapien
NEEFEHFIFGWGSSEDAKSDSSKPCGKIRNLKKMEMFTFLLTCIFLPLLRGHSLFTCEPITVPRCMKMAYNMTFFPNLMGHYDQSIAAVEMEHFLPLANLECSPNIETFLCKAFVPTCIEQIHVVPPCRKLCEKVYSDCKKLIDTFGIRWPEELECDRLQYCDETVPVTFDPHTEFLGPQKKTEQVQRDIGFWCPRHLKTSGGQGYKFLGIDQCAPPCPNMYFKSDELEFAKSFIGTVSIFCLCATLFTFLTFLIDVRRFRYPERPIIYYSVCYSIVSLMYFIGFLLGDSTACNKADEKLELGDTVVLGSQNKACTVLFMLLYFFTMAGTVWWVILTITWFLAAGRKWSCEAIEQKAVWFHAVAWGTPGFLTVMLLAMNKVEGDNISGVCFVGLYDLDASRYFVLLPLCLCVFVGLSLLLAGIISLNHVRQVIQHDGRNQEKLKKFMIRIGVFSGLYLVPLVTLLGCYVYEQVNRITWEITWVSDHCRQYHIPCPYQAKAKARPELALFMIKYLMTLIVGISAVFWVGSKKTCTEWAGFFKRNRKRDPISESRRVLQGLVQRVILLTLAWHRATICRSPVLQNQAASKVPHLCLFTRFQE

SEQ ID NO: 140 - protein, 199 aa, Homo sapien
  MISC_FEATURE (4)..(4): X=any amino acid
MLMXESVRSQKASRPIEKTFSRQRQPREPQVYTLPPSRDELTKNQVSLTCLVKGFYPSDIAVEWESNGQPENNYKTTPPVLDSDGSFFLYSKLTVDKSRWQQGNVFSCSVMHEALHNHYTQKSLSLSPELQLEESCAEAQDGELDGLWTTITIFITLFLLSVCYSATVTFFKVKWIFSSVVDLKQTIIPDYRNMIGQGA

SEQ ID NO: 141 - protein, 253 aa, Homo sapien
GCSDFKQRTLLSGSWEQSRCQHHPLAACPHCWILGWNWTRRDSQPQSPHWGEKGPGPGHCHLPPTPVHRDHSEKSLGHVAAAGAPQCKGEDSPRKGWASAQTGLPEKAGDQVPGGQDSALVGPEDRGGPGASGREVEGHRESQERGHSQNSSQRLASSPGSRAAGTSSHSGGTRWRGKTTKRVPVFLRKRGCWPRVLDRGPHALLPPSRRSVTVTQNLQTGRETRAGVRPEPASAVREDSRAHSKEVPPFQLW

SEQ ID NO: 142 - protein, 179 aa, Homo sapien
PEDSVARTITRWFYHQLIPTFGIKNRIQNPDVYIHPAFTVDTTCGILCVLLCNLCSKAQFHAHRPSGAITSGPDSSPISEARSPLQQNFQDNNSRVTVVCGRPGRECNYSREDKDRQKMYATIYELKEDKSYNVTSVLFRKKKCDYWIRTFVPGCQARRSSRWATIKSNPGLTSYLVRA

SEQ ID NO: 143 - protein, 153 aa, Homo sapien
NSKPGRLIHPAFTVDTTCGILCVLLCNLCSKAQFHAHRPSGAITSGPDSSPISEARSPLQQNFQDNNSRVTVVCGRPGRECNYSREDKDRQKMYATIYELKEDKSYNVTSVLFRKKKCDYWIRTFVPGCQARRSSRWATIKSNPGLTSYLVRA

SEQ ID NO: 144 - protein, 79 aa, Homo sapien
ALHAGAGPEHRGLRDAAPGSLECLGVSSPCRKQNAPSEAPPAAPGRGMRGSEHPCPAVIAARHCSSQLFCPFAPGKRFC

SEQ ID NO: 145 - protein, 79 aa, Homo sapien
  MISC_FEATURE (8)..(9): X=any amino acid
ALHAGAGXXHRGLRDAAPGSLECLGVSSPCRKQNAPSEAPPAAPGRGMRGSEHPCPAVIAARHCSSQLFCPFAPGKRFC

SEQ ID NO: 146 - protein, 130 aa, Homo sapien
MGPLFVKTSGSRYELSAEALAGSKGTERLRSTWACLQTSVPCQPRTGWTAATPMSPPRSATTGAAALTPGSLECLGVSSPCRKQNAPSEAPPAAPGRGMRGSEHPCPAVIAARHCSSQLFCPFAPGKRFC

SEQ ID NO: 147 - protein, 117 aa, Homo sapien
MGPLFVKTSGSRYELSAEALAGSKGTERLRSTWACLQTSVPCQPRTGWTAATPMSPPRSATTGAAALTPGSLECLGVSSPCRKQNAPSEAPPAAPGRGMRGSEHPCPAVIAARHNVL

SEQ ID NO: 148 - protein, 142 aa, Homo sapien
MVQVHTCERLHVMWQNLAKAETKLHTSNSGGRRELSELVYTDVLDRSCSRNWQDYGVREVDQVKRLTGPGLSEGPEPSISVMVTGGPWPTRLSRTCLHYLGEFGEDQIYEAHQQGRGALEALLCGGPQGACSEKVSATREEL

SEQ ID NO: 149 - protein, 154 aa, Homo sapien
RTMPTWHLRGPGGGSGRRMGGVRCQFPIGLGQVFCGGPHTTQDTHTSAPQPQTTLAELAPGAMRLSLPLLLLLLGAWAIPGGLGDRAPLTATAPQLDDEEMYSAHMPAHLRCDACRAVAYQPGPSLSPDSLPNPDGAALAMCTWCKCTRVSACT

SEQ ID NO: 150 - protein, 182 aa, Homo sapien
MASTSRLDALPRVTCPNHPDAILVEDYRAGDMICPECGLVVGDRVIDVGSEWRTFSNDKATKDPSRVGDSQNPLLSDGDLSTMIGKGTGAASFDEFGNSKYLGRDHASRPRSHPSRRLTQGRVAMEKIPVSAFLLLVALSYTLARDTTVKPGAKKDTKDSRPKLPQTLSRGWGDQTHLDSDI

SEQ ID NO: 151 - protein, 403 aa, Homo sapien
MSKETIIKCEKQKPRFHAFLKINQAKPECGRQSLVELLIRPVQRLPSVALLLNDLKKHTADENPDKSTLEKAIGSLKEVMTHINEDKRKTEAQKQIFDVVYEVDGCPANLLSSHRSLVQRVETISLGEHPCDRGEQVTLFLFNDCLEIARKRHKVIGTFRSPHGQTRPPASLKHIHLMPLSQIKKVLDIRETEDCHNAFALLVRPPTEQANVLLSFQMTSDELPKENWLKMLCRHVANTICKADAENLIYTADPESFEVNTKDMDSTLSRASRAIKKTSKKVTRAFSFSKTPKRALRRALMTSHGSVEGRSPSSNDKHVMSRLSSTSSLAITHSVSTSNVIGFTKHVYVQRLNSTGGRSQYSWFQSVRHSAFRASFSEILEGNTDFSNFKKVLSKSSLTFVKN

SEQ ID NO: 152 - protein, 47 aa, Homo sapien
  MISC_FEATURE (8)..(8): X=any amino acid
TAQGFRTXLELVINYQQLCIYWTKYYDFKNPIIEKYLRRQLTKTQAL

SEQ ID NO: 153 - protein, 81 aa, Homo sapien
  MISC_FEATURE (14)..(14): X=any amino acid
  MISC_FEATURE (16)..(16): X=any amino acid
  MISC_FEATURE (25)..(26): X=any amino acid
  MISC_FEATURE (36)..(36): X=any amino acid
DPPAFLPCPFHPLXPXHEALRHISXXPFFPKNLPLXKAIYIHIVTGCAPYFTVILVTIEGFWNFHIPCPEFIPLRVIINNL

SEQ ID NO: 154 - protein, 207 aa, Homo sapien
MSEHSLKAGADITPREGDELARLPYLRTWFRTRSAIILHLSNGSVQIHFFPDPPQLILGPLMATLTYIDENREFRTFRLVLLEEYGCCKELASRLRYARTMVDHSCLSSRSASNRLKASIIAALPIRSWCPPHSHLHLGPILVGSRGAMSAGVPPRPRWLGTEAASVLARWGLLYTVISCTLFGCGFYTPCPPPPQPHHMNCTEYFY

SEQ ID NO: 155 - protein, 199 aa, Homo sapien
  MISC_FEATURE (132)..(132): X=any amino acid
  MISC_FEATURE (137)..(137): X=any amino acid
  MISC_FEATURE (142)..(142): X=any amino acid
  MISC_FEATURE (144)..(144): X=any amino acid
  MISC_FEATURE (147)..(147): X=any amino acid
ACPAALPTDLVPHPQRHHPAPQQRQRQIHFFPDPPQLILGPLMATRDLHRRESGIPHIPPEFSWRSTAAARSWPTGSATPALWWNTAAELTLGQQPFQGLLIAALPSGAGALLTPTCIWGPYWLAPAVPCLXVCPPXPGGWXQXLHXSLHGGGCCISYFCTCSGVGSTALSPSPSTPPYELYRIFLLNSELSFPWLYAH

SEQ ID NO: 156 - protein, 175 aa, Homo sapien
MSEHSLKAGADITPREGDELARLPYLRTWFRTRSAIILHLSNGSVQIHFFPDPPQLILGPLMATLTYIDENREFRTFRLSSPGGVRLLQGAGQPGPLRPHYGGPQLLSSRSASNRLKASIIAALPIRSWCPPHSHLHLGPILVGSRGAMSAGVPPRPRWLGTEAASVLARWGLLE

SEQ ID NO: 157 - protein, 162 aa, Homo sapien
  MISC_FEATURE (132)..(132): X=any amino acid
  MISC_FEATURE (137)..(137): X=any amino acid
  MISC_FEATURE (142)..(142): X=any amino acid
  MISC_FEATURE (144)..(144): X=any amino acid
  MISC_FEATURE (147)..(147): X=any amino acid
ACPAALPTDLVPHPQRHHPAPQQRQRQIHFFPDPPQLILGPLMATRDLHRRESGIPHIPPEFSWRSTAAARSWPTGSATPALWWNTAAELTLGQQPFQGLLIAALPSGAGALLTPTCIWGPYWLAPAVPCLXVCPPXPGGWXQXLHXSLHGGGCWNSDKCTF

SEQ ID NO: 158 - protein, 128 aa, Homo sapien [sequence omitted]

SEQ ID NO: 159 - protein, 95 aa, Homo sapien
MDPTSNRAHLPGSFATSVLTVHVTCDFCFSGLGKTTPDPSANISLDGVDVPLGTGISSGVNDTSLLYNEYIVYDIAQVNLKYLLKLKFNFKTSLW

SEQ ID NO: 160 - protein, 359 aa, Homo sapien
  MISC_FEATURE (68)..(68): X=any amino acid
MIFDVERVTNARLVNFDIDLLQDALLVMISAWLITRHKIIDSRRVAVPYVQADTPRIGRFVDRSVSWXLTQNRRSLTATCLTLTDYRAPNREASAPEQCRQVCRAKVEMLDNLLDIEVAYSLLRGGSDDSSKDPIDVNYEKLKTDIKVVDRDSEEAEIIRKYVKNTHATTHNAYDLEVIDIFKIEREGECQRYKPFKQLHNRRLLWHGSRTTNFAGILSQGLRIAPPEAPVTGYMFGKGIYFADMVSKSANYCHTSQGDPIGLILLGEVALGNMYELKHASHISKLPKGKHSVKGLGKTTPDPSANISLDGVDVPLGTGISSGVNDTSLLYNEYIVYDIAQVNLKYLLKLKFNFKTSLW

SEQ ID NO: 161 - protein, 283 aa, Homo sapien
QPRDLTLTDYRAPNREASAPEQCRQVCRAKVEMLDNLLDIEVAYSLLRGGSDDSSKDPIDVNYEKLKTDIKVVDRDSEEAEIIRKYVKNTHATTHNAYDLEVIDIFKIEREGECQRYKPFKQLHNRRLLWHGSRTTNFAGILSQGLRIAPPEAPVTGYMFGKGIYFADMVSKSANYCHTSQGDPIGLILLGEVALGNMYELKHASHISKLPKGKHSVKGLGKTTPDPSANISLDGVDVPLGTGISSGVNDTSLLYNEYIVYDIAQVNLKYLLKLKFNFKTSLW

SEQ ID NO: 162 - protein, 1047 aa, Homo sapien [sequence omitted]

SEQ ID NO: 163 - protein, 158 aa, Homo sapien
TCALKGCPSLTPAFPGLEPAEPQQGRRGVPGPCSPAPPGSARGGAGRGGTRRASWALAPPSGGHLGTGAAGVGASTLRSRQPSILGWPRGGGRAAPCSPETNARTGPPEAGSAGRNRSRFVLHLRKCLRAYSHSILVYQNEMQGTKNNIIEGSKSEIK

SEQ ID NO: 164 - protein, 343 aa, Homo sapien
NLTKNMTALSSENCSFQYQLRQTNQPLDVNYLLFLIILGKILLNILTLGMRRKNTCQNFMEYFCISLAFVDLLLLVNISIILYFRDFVLLSIRFTKYHICLFTQIISFTYGFLHYPVFLTACIDYCLNFSKTTKLSFKCQKLFYFFTVILIWISVLAYVLGDPAIYQSLKAQNAYSRHCPFYVSIQSYWLSFFMVMILFVAFITCWEEVTTLVQAIRITSYMNETILYFPFSSHSSYTVRSKKIFLSKLIVCFLSTWLPFVLLQVIIVLLKVQIPAYIEMNIPWLYFVNSFLIATVYWFNCHKLNLKDIGLPLDPFVNWKCCFIPLTIPNLEQIEKPISIMIC

SEQ ID NO: 165 - protein, 343 aa, Homo sapien; identical to SEQ ID NO: 164

SEQ ID NO: 166 - protein, 223 aa, Homo sapien
MDSVEKTTNRSEQKSRKFLKSLIRKQPQELLLVIGTGVSAAVAPGIPALCSWRSCIEAVIEAAEQLEVLHPGDVAEFRRKVTKDRDLLVVAHDLIRKMSPRTGDAKPSFFQDCLMEVFDDLEQHIRSPVVLQSILSLMDRGAMVLTTNYDNLLEAFGRRQNKPMESLDLKDKTKVWAGGAGGLWPAAEQAHGVPGLEGQDQGMGWGCGRSLAGGRTSPWSPWT

SEQ ID NO: 167 - protein, 340 aa, Homo sapien
PPTHNLSPRNTHKRNSQPRGRVFLDEEKSAGKTLTHAQTCGRPWCAQRRAGFWEPPVDKTDKPACLRSPLPENHPLAPPSVRGARPPRDPGGVAGCGGEEVAARAGTSVSEAPQNSQMDSVEKTTNRSEQKSRKFLKSLIRKQPQELLLVIGTGVSAAVAPGIPALCSWRSCIEAVIEAAEQLEVLHPGDVAEFRRKVTKDRDLLVVAHDLIRKMSPRTGDAKPSFFQDCLMEVFDDLEQHIRSPVVLQSILSLMDRGAMVLTTNYDNLLEAFGRRQNKPMESLDLKDKTKVWAGGAGGLWPAAEQAHGVPGLEGQDQGMGWGCGRSLAGGRTSPWSPWT

SEQ ID NO: 168 - protein, 314 aa, Homo sapien
GKSAGKTLTHAQTCGRPWCAQRRAGFWEPPVDKTDKPACLRSPLPENHPLAPPSVRGARPPRDPGGVAGCGGEEVAARAGTSVSEAPQNSQMDSVEKTTNRSEQKSRKFLKSLIRKQPQELLLVIGTGVSAAVAPGIPALCSWRSCIEAVIEAAEQLEVLHPGDVAEFRRKVTKDRDLLVVAHDLIRKMSPRTGDAKPSFFQDCLMEVFDDLEQHIRSPVVLQSILSLMDRGAMVLTTNYDNLLEAFGRRQNKPMESLDLKDKTKVWAGGAGGLWPAAEQAHGVPGLEGQDQGMGWGCGRSLAGGRTSPWSPWT

SEQ ID NO: 169 - protein, 349 aa, Homo sapien
MDSVEKTTNRSEQKSRKFLKSLIRKQPQELLLVIGTGVSAAVAPGIPALCSWRSCIEAVIEAAEQLEVLHPGDVAEFRRKVTKDRDLLVVAHDLIRKMSPRTGDAKPSFFQDCLMEVFDDLEQHIRSPVVLQSILSLMDRGAMVLTTNYDNLLEAFGRRQNKPMESLDLKDKTKVLEWARGHMKYGVLHIHGLYTDPCGVVLDPSGYKDVTQDAEVMEVLQNLYRTKSFLFVGCGETLRDQIFQALFLYSVPNKVDLEHYMLVLKENEDHFFKHQADMLLHGIKVVSYGDCFDHFPGYVQDLATQICKQQSPDADRVDSTTLLVKQIFLLASLFFAYTFHCLLSLTVKS

SEQ ID NO: 170 - protein, 89 aa, Homo sapien
MKQVMPDLPWSKAVLSIDIAVKCESNGQPGNNYETTPPVLDSDGSFFLYSMLTVYYEQVAVGERLLMLRDDEALYNHYTQKSLSLYPGR

SEQ ID NO: 171 - protein, 47 aa, Homo sapien
SVRAMGSRGTTTRPRLPCWTPTAPSSSIACSPCTRAGGSRGTSSHAP

SEQ ID NO: 172 - protein, 112 aa, Homo sapien
MSWKHPRSQPLADELGGTPGVANSRRLLWAGWHGSSVPGTGVVGSPEQVGHDAGVQLQDGAHAQQVHDLVGVAPVVKAARSPALGQTGYIYQSPKQRQCVHAQVAGQGAWSP

SEQ ID NO: 173 - protein, 146 aa, Homo sapien
KLGPLGNSHGLLCLAVSNKKYLNLGSTQACSCGNMALPVPLLMSSRVLTPLRLSPAAEPSAPGLGPAAEAPCCVEQRGFLSRHIPRWVPGAVGSMALKVEGRHGPGVPGSEAAELPVSVSWKKQLQPLCLWPAGTRRVHAPLVLLS

SEQ ID NO: 174 - protein, 507 aa, Homo sapien
MLERPPALAMPMPTEGTPPPLSGTPIPVPAYFRHAEPGFSLKRPRGLSRSLPPPPPAKGSIPISRLFPPRTPGWHQLQPRRVSFRGEASETLQSPGYDPSRPESFFQQSFQRLSRLGHGSYGEVFKVRSKEDGRLYAVKRSMSPFRGPKDRARKLAEVGSHEKVGQHPCCVRLEQAWEEGGILYLQTELCGPSLQQHCEAWGASLPEAQVWGYLRDTLLALAHLHSQGLVHLDVKPANIFLGPRGRCKLGDFGLLVELGTAGAGEVQEGDPRYMAPELLQGSYGTAADVFSLGLTILEVACNMELPHGGEGWQQLRQGYLPPEFTAGEYVRAGGGAATGSWGDSGWPWRHCWAQGAVGVLGPRCGPSSWAGLSSELRSVLVMMLEPDPKLRATAEALLALPVLRQPRAWGVLWCMAAEALSRGWALWQALLALLCWLWHGLAHPASWLQPLGPPATPPGSPPCSLLLDSSLSSNWDDDSLGPSLSPEAVLARTVGSTSTPRSRCTPR

SEQ ID NO: 175 - protein, 335 aa, Homo sapien
GCWARPVMLERPPALAMPMPTEGTPPPLSGTPIPVPAYFRHAEPGFSLKRPRGLSRSLPPPPPAKGSIPISRLFPPRTPGWHQLQPRRVSFRGEASETLQSPGYDPSRPESFFQQSFQRLSRLGHGSYGEVFKVRSKEDGRLYAVKRSMSPFRGPKDRARKLAEVGSHEKVGQHPCCVRLEQAWEEGGILYLQTELCGPSLQQHCEAWGASLPEAQVWGYLRDTLLALAHLHSQGLVHLDVKPANIFLGPRGRCKLGDFGLLVELGTAGAGEVQEGDPRYMAPELLQGSYGTAADVFSLGLTILEVACNMELPHGGEGWQQLRQGYLPPEFTAGE

SEQ ID NO: 176 - protein, 146 aa, Homo sapien; identical to SEQ ID NO: 173

SEQ ID NO: 177 - protein, 513 aa, Homo sapien
MLERPPALAMPMPTEGTPPPLSGTPIPVPAYFRHAEPGFSLKRPRGLSRSLPPPPPAKGSIPISRLFPPRTPGWHQLQPRRVSFRGEASETLQSPGYDPSRPESFFQQSFQRLSRLGHGSYGEVFKVRSKEDGRLYAVKRSMSPFRGPKDRARKLAEVGSHEKVGQHPCCVRLEQAWEEGGILYLQTELCGPSLQQHCEAWGASLPEAQVWGYLRDTLLALAHLHSQGLVHLDVKPANIFLGPRGRCKLGDFGLLVELGTAGAGEVQEGDPRYMAPELLQGSYGTAADVFSLGLTILEVACNMELPHGGEGWQQLRQGYLPPEFTAGEYVRAGGGAATGSWGDSGWPWRHCWAQGAVGVLGPRCGPSSWAGLSSELRSVLVMMLEPDPKLRATAEALLALPVLRQPRAWGVLWCMAAEALSRGWALWQALLALLCWLWHGLAHPASWLQPLGPPATPPGSPPCSLLLDSSLSSNWDDDSLGPSLSPEAVLARTVGSTSTPRSRCTPRGCPGPK

SEQ ID NO: 178 - protein, 335 aa, Homo sapien; identical to SEQ ID NO: 175

SEQ ID NO: 179 - protein, 146 aa, Homo sapien; identical to SEQ ID NO: 173

SEQ ID NO: 180 - protein, 146 aa, Homo sapien; identical to SEQ ID NO: 173

SEQ ID NO: 181 - protein, 146 aa, Homo sapien; identical to SEQ ID NO: 173

SEQ ID NO: 182 - protein, 274 aa, Homo sapien
VIPASSNCGACPSGHWEDSPLWLVGSLGTEPIFHDVPILPRVHDQACWGVPSPCFRPSLTDEDSSPLPPTSKRQPWTGSVSQGQPCPFLSPSLPASLGLTILEVACNMELPHGGEGWQQLRQGYLPPEFTAGLSSELRSVLVMMLEPDPKLRATAEALLALPVLRQPRAWGVLWCMAAEALSRGWALWQALLALLCWLWHGLAHPASWLQPLGPPATPPGSPPCSLLLDSSLSSNWDDDSLGPSLSPEAVLARTVGSTSTPRSRCTPRGCPGPK

SEQ ID NO: 183 - protein, 215 aa, Homo sapien
LMKTAALSHPPPRGSPGLGLCPRANPAPFCPHPVPASLGLTILEVACNMELPHGGEGWQQLRQGYLPPEFTAGLSSELRSVLVMMLEPDPKLRATAEALLALPVLRQPRAWGVLWCMAAEALSRGWALWQALLALLCWLWHGLAHPASWLQPLGPPATPPGSPPCSLLLDSSLSSNWDDDSLGPSLSPEAVLARTVGSTSTPRSRCTPRGCPGPK

SEQ ID NO: 184 - protein, 711 aa, Homo sapien
MSAAVTAGKLARAPADPGKAGVPGVAAPGAPAAAPPAKEIPEVLVDPRSRRRYVRGRFLGKGGFAKCFEISDADTKEVFAGKIVPKSLLLKPHQREKMSMEISIHRSLAHQHVVGFHGFFEDNDFVFVVLELCRRRSLLELHKRRKALTEPEARYYLRQIVLGCQYLHRNRVIHRDLKLGNLFLNEDLEVKIGDFGLATKVEYDGERKKTLCGTPNYIAPEVLSKKGHSFEVDVWSIGCIMYTLLVGKPPFETSCLKETYLRIKKNEYSIPKHINPVAASLIQKMLQTDPTARPTINELLNDEFFTSGYIPARLPITCLTIPPRFSIAPSSLDPSNRKPLTVLNKGLENPLPERPREKEEPVVRETGEVVDCHLSDMLQQLHSVNASKPSERGLVRQEEAEDPACIPIFWVSKWVDYSDKYGLGYQLCDNSVGVLFNDSTRLILYNDGDSLQYIERDGTESYLTVSSHPNSLMKKITLLKYFRNYMSEHLLKAGANITPREGDELARLPYLRTWFRTRSAIILHLSNGSVQINFFQVSWRSPGAGESWGRLRMPGSGPCGLNVELSGSGSHQAHLVPTDGSRDLHRREAGLPHIPPESPGGVRLLQGAGQPAPLRPHYGGQAAELTLGQQPSQGLLIAALPSGLVPSSLPPASGAHTGWLPRCHVCSVPPSPGGWAELHHPCRWGLLYKLFLYMFGCGFYSLVPLPLNPTI

SEQ ID NO: 185 - protein, 601 aa, Homo sapien
SGAQAFVTFPAPRLNSGRSGAVRRLCSDRGLQRSFGSMSAAVTAGKLARAPADPGKAGVPGVAAPGAPAAAPPAKEIPEVLVDPRSRRRYVRGRFLGKGGFAKCFEISDADTKEVFAGKIVPKSLLLKPHQREKMSMEISIHRSLAHQHVVGFHGFFEDNDFVFVVLELCRRRSLLELHKRRKALTEPEARYYLRQIVLGCQYLHRNRVIHRDLKLGNLFLNEDLEVKIGDFGLATKVEYDGERKKTLCGTPNYIAPEVLSKKGHSFEVDVWSIGCIMYTLLVGKPPFETSCLKETYLRIKKNEYSIPKHINPVAASLIQKMLQTDPTARPTINELLNDEFFTSGYIPARLPITCLTIPPRFSIAPSSLDPSNRKPLTVLNKGLENPLPERPREKEEPVVRETGEVVDCHLSDMLQQLHSVNASKPSERGLVRQEEAEDPACIPIFWVSKWVDYSDKYGLGYQLCDNSVGVLFNDSTRLILYNDGDSLQYIERDGTESYLTVSSHPNSLMKKITLLKYFRNYMSEHLLKAGANITPREGDELARLPYLRTWFRTRSAIILHLSNGSVQINFFQVSWRSPGAGESWGRLRMPGSGPCGLNVE

SEQ ID NO: 186 - protein, 86 aa, Homo sapien
GVRPPTRLAPRPGKYILATDHTKLILCPLMAAVTYIDEKRDFRTYRLSLLEEYGCCKELASRLRYARTMVDKLLSSRSASNRLKAS

SEQ ID NO: 187 - protein, 162 aa, Homo sapien
WRAPPDSPRPETRKVYSSYRSHQAHLVPTDGSRDLHRREAGLPHIPPESPGGVRLLQGAGQPAPLRPHYGGQAAELTLGQQPSQGLLIAALPSGLVPSSLPPASGAHTGWLPRCHVCSVPPSPGGWAELHHPCRWGLLYKLFLYMFGCGFYSLVPLPLNPTI

SEQ ID NO: 188 - protein, 442 aa, Homo sapien
MSAAVTAGKLARAPADPGKAGVPGVAAPGAPAAAPPAKEIPEVLVDPRSRRRYVRGRFLGKGGFAKCFEISDADTKEVFAGKIVPKSLLLKPHQREKMSMEISIHRSLAHQHVVGFHGFFEDNDFVFVVLELCRRRSLLELHKRRKALTEPEARYYLRQIVLGCQYLHRNRVIHRDLKLGNLFLNEDLEVKIGDFGLATKVEYDGERKKTLCGTPNYIAPEVLSKKGHSFEVDVWSIGCIMYTLLVGKPPFETSCLKETYLRIKKNEYSIPKHINPVAASLIQKMLQTDPTARPTINELLNDEFFTSGYIPARLPITCLTIPPRFSIAPSSLDPSNRKPLTVLNKGLENPLPERPREKEEPVVRETGEVVDCHLSDMLQQLHSVNASKPSERGLVRQGGYCGALGGAGLLGASGKGRRRLGQQSTGDLFRPCLHRTIGFPIS

SEQ ID NO: 189 - protein, 73 aa, Homo sapien
MKGISTDHTKLILCPLMAAVTYIDEKRDFRTYRLSLLEEYGCCKELASRLRYARTMVDKLLSSRSASNRLKAS

SEQ ID NO: 190 - protein, 158 aa, Homo sapien
PRPYYELCLDERYQYRSHQAHLVPTDGSRDLHRREAGLPHIPPESPGGVRLLQGAGQPAPLRPHYGGQAAELTLGQQPSQGLLIAALPSGLVPSSLPPASGAHTGWLPRCHVCSVPPSPGGWAELHHPCRWGLLYKLFLYMFGCGFYSLVPLPLNPTI

SEQ ID NO: 191 - protein, 114 aa, Homo sapien
MPLSHVCTADSGHWVQSTPASWGNPGLSFPHQTEFGPHNTFHFFTPRASAANFCGHTLFIEKYRSLRSSSTSMSFWQPVAGKEMFSFILKQLYASEPCPPPPQPHHMNCTEYFY

SEQ ID NO: 192 - protein, 57 aa, Homo sapien [sequence omitted]

SEQ ID NO: 193 - protein, 142 aa, Homo sapien
SHQAHLVPTDGSRDLHRREAGLPHIPPESPGGVRLLQGAGQPAPLRPHYGGQAAELTLGQQPSQGLLIAALPSGLVPSSLPPASGAHTGWLPRCHVCSVPPSPGGWAELHHPCRWGLLYKLFLYMFGCGFYSLVPLPLNPTI

SEQ ID NO: 194 - protein, 540 aa, Homo sapien
MVVDSVKAGSRCRCAGEGMGWGHREGEKPTKTPLSSLGSPESSPVLPLPGNPLPSPPASIHLPIPPALSFPPTSLLELHKRRKALTEPEARYYLRQIVLGCQYLHRNRVIHRDLKLGNLFLNEDLEVKIGDFGLATKVEYDGERKKTLCGTPNYIAPEVLSKKGHSFEVDVWSIGCIMYTLLVGKPPFETSCLKETYLRIKKNEYSIPKHINPVAASLIQKMLQTDPTARPTINELLNDEFFTSGYIPARLPITCLTIPPRFSIAPSSLDPSNRKPLTVLNKGLENPLPERPREKEEPVVRETGEVVDCHLSDMLQQLHSVNASKPSERGLVRQEEAEDPACIPIFWVSKWVDYSDKYGLGYQLCDNSVGVLFNDSTRLILYNDGDSLQYIERDGTESYLTVSSHPNSLMKKITLLKYFRNYMSEHLLKAGANITPREGDELARLPYLRTWFRTRSAIILHLSNGSVQINFFQDHTKLILCPLMAAVTYIDEKRDFRTYRLSLLEEYGCCKELASRLRYARTMVDKLLSSRSASNRLKAS

SEQ ID NO: 195 - protein, 124 aa, Homo sapien
MAAGCSEAPRPAAASDGSLVGQAGVLPCLELPTYAAACALVNSRYSCLVAGPHQRHIALSPRYLNRKRTGIREQLDAELLRYSESLLGVPMHMITSKLWESLEIFMMIKDTFILTLKPICYFLP

SEQ ID NO: 196 - protein, 211 aa, Homo sapien
MDLRNTPAKSLDKFIEDYLLPDTCFRMQINHAIDIICGFLKERCFRGSSYPVCVSKVVKGGSSGKGTTLRGRSDADLVVFLSPLTTFQDQLNRRGEFIQEIRRQLEACQRERAFSVKFEVQAPRWGNPRALSFVLSSLQLGEGVEFDVLPAFDALGQLTGSYKPNPQIYVKLIEECTDLQKEGEFSTCFTELQRDFLKRVGGSWHKRLRPG

SEQ ID NO: 197 - protein, 244 aa, Homo sapien
GNETNSSPSSVSRRDKSKQVWEAVLLPLSLLSMMDLRNTPAKSLDKFIEDYLLPDTCFRMQINHAIDIICGFLKERCFRGSSYPVCVSKVVKGGSSGKGTTLRGRSDADLVVFLSPLTTFQDQLNRRGEFIQEIRRQLEACQRERAFSVKFEVQAPRWGNPRALSFVLSSLQLGEGVEFDVLPAFDALGQLTGGYKPNPQIYVKLIEECTDLQKEGEFSTCFTELQRDFLKRVGGSWHKRLRPG

SEQ ID NO: 198 - protein, 84 aa, Homo sapien
TKPRPVILDPADPTGNLGGGDPKGWRQLAPQGEGWVELPQIYVKLIEECTDLQKEGEFSTCFTELQRDFLKRVGGSWHKRLRPG

SEQ ID NO: 199 - protein, 123 aa, Homo sapien
CDHVSHPFKLLKATVQTMRPTIPGGIRNMVTLEHMSTLISLIDPAHSRQHPPHRQKRTGPAPSSECQCILGERAPVLSGPVPSFSGGTLDPEKTKLLSELVYNPGQNPGLLTPGLLCPLSYHR

SEQ ID NO: 200 - protein, 37 aa, Homo sapien
MYGEVPSHPPRSSTPVPSHQLSAPGGRWPPQPLLSDL

SEQ ID NO: 201 - protein, 84 aa, Homo sapien
RCTGKSPPIPHAAPPQSQATSCLLLVGGGLLSPSSLTFNLTLTLHRAPTLHPSWKAGLMASHWPPPPDQSVLFRGLAPFPVSLK

SEQ ID NO: 202 - protein, 288 aa, Homo sapien
MAFSGSQAPYLSPAVPFSGTIQGGLQDGLQITVNGTVLSSSGTRFAVNFQTGFSGNDIAFHFNPRFEDGGYVVCNTRQNGSWGPEERKTHMPFQKGMPFDLCFLVQSSDFKVMVNGILFVQYFHRVPFHRVDTISVNGSVQLSYISFQNPRTVPVQPAFSTVPFSQPVCFPPRPRGRRQKVSSTQRPWVAEQTVGRTEGLRGWPQPAGHSGPTGRILPTQEFPVSVRWAPRAGDLGVTLDSSLPLLYVSPRHERVSLLKPPMWSRPLGFLTMTTGVQFPTPYTQPLPQ

SEQ ID NO: 203 - protein, 221 aa, Homo sapien
MAFSGSQAPYLSPAVPFSGTIQGGLQDGLQITVNGTVLSSSGTRFAVNFQTGFSGNDIAFHFNPRFEDGGYVVCNTRQNGSWGPEERKTHMPFQKGMPFDLCFLVQSSDFKVMVNGILFVQYFHRVPFHRVDTISVNGSVQLSYISFQNPRTVPVQPAFSTVPFSQPVCFPPRPRGRRQKARTCLPPEATDVVQASGIPHHDDRGPVPHPLHPTTATVTFL

SEQ ID NO: 204 - protein, 246 aa, Homo sapien
MAFSGSQAPYLSPAVPFSGTIQGGLQDGLQITVNGTVLSSSGTRFAVNFQTGFSGNDIAFHFNPRFEDGGYVVCNTRQNGSWGPEERKTHMPFQKGMPFDLCFLVQSSDFKVMVNGILFVQYFHRVPFHRVDTISVNGSVQLSYISFQPPGVWPANPAPITQTVIHTVQSAPGQMFSTPAIPPMMYPHPAYPMPFITTILGGLYPSKSILLSGTVLPSAQRCGSCVKLTASRWPWMVSTCLNTTIA

SEQ ID NO: 205 - protein, 141 aa, Homo sapien [sequence omitted]

SEQ ID NO: 206 - protein, 93 aa, Homo sapien
MAFSVPRPSLSNPAWDLGFNAEAMSLSGPASGYSHPGTEKAADGDCLPQPQQHLGLQLLESYSPLPSPTQLHPSPKPPAVCSWWEVASSAPPL

SEQ ID NO: 207 - protein, 66 aa, Homo sapien
ARDLLDRTPVFWACRGGHLVILKQLLNQGARVNARDKVRCTVLWGPVGNTGADAVPGEVASSAPPL

SEQ ID NO: 208 - protein, 88 aa, Homo sapien
PGSPGQCPGQGEVHGALGACREHGSRRCSWRGGLLSPSSLTFNLTLTLHRAPTLHPSWKAGLMASHWPPPPDQSVLFRGLAPFPVSLK

SEQ ID NO: 209 - protein, 192 aa, Homo sapien
MQVRGPANSSCWTGVGLCPEQKHGGSHDHDVYASSSVASSEAYVDMRKIGSSRGMVSAYPRQLESLIRLAEAHAKVRLSNKVEAIDVEEAKRLHREALKQSATDPRTGIVDISILTTGMSATSRKRKEELAEALKKLILSKGKTPALKYQQLFEDIRGQSDIAITKDMFEEALRALADDDFLTVTGKTVRLL

SEQ ID NO: 210 - protein, 95 aa, Homo sapien
MRLFIDTNGHEYYTRDREKQRQLRRRQPFENETLLDSLNEVGNLPELVKLPGNFYDTIFGEQSDIAITKDMFEEALRALADDDFLTVTGKTVRLL

SEQ ID NO: 211 - protein, 103 aa, Homo sapien
AKIAPLHSSLSNRVRLSQKKKKKKPANFQTYRRDYFQVPFYSIAAGLLLCVCTDAVWGMVCVLDFLMAIISMLMDLMTGIAWAYHLIGKGLEPFFFMALLFLR

SEQ ID NO: 212 - protein, 316 aa, Homo sapien
MAFSGCQAPYLSPAVPFSGTIQGGLQDGFQITVNGAVLSCSGTRFAVDFQTGFSGNDIAFHFNPRFEDGGYVVCNTRQKGTWGPEERKMHMPFQKGMPFDLCFLVQSSDFKEHGWSWKPLQEQKTKHRKFSLISKELNDENTWTQAGKQHTLGPGRGRRASGRLAMDAGLDTKVMVNGSLFVQYFHRVPFHRVDTISVNGSVQLSYISFQNPRAVPVQPAFSTVPFSQPVCFPPRPRGRRQKPPSVRPANPAPITQTVIHTVQSASGQMFSQTPAIPPMMYPHPAYPMPFITTIPGGLYPSKSIILSGTVLPSAQR

SEQ ID NO: 213 - protein, 182 aa, Homo sapien
AAPWPWGRGLGCGAVWVLSSSPLPRPSLSNRAWDLGFNAEAMSLSGPASGYSHPGIEKAADWDCLPQPQQHLGRQLLESYNPRRRAQPGRGEEWAVKMKPHAQSPPIPHAAPPQSQATSCLLLVGDGLLSPSSLTFNLTLTLHPAPTLHPSWKAGLMASHWPPPTDQSVLFRGLAPFPVSLK

SEQ ID NO: 214 - protein, 141 aa, Homo sapien [sequence omitted]

SEQ ID NO: 215 - protein, 791 aa, Homo sapien
MLSSEPHAFPWKPGPWSCCFCPGLLWSPPRALPGLEEALVSVELSTSRHEGGGCTVACCAPLGAIAGPCVPSTVLLLNPVEVQAEFLAVANKLSTPGHSPHSAYTTLLLHAFQATFGAHCDVPGLHCRLQAKTLAELEDIFTETAEAQELASGIGDAAEARRWLRTKLQAVGEKAGFPGVLDTAKPGKLHTIPIPVARCYTYSWSQDSFDILQEILLKEQELLQPGILGDDEEEEEEEEEVEEDLETDGHCAERDSLLSTSSLASHDSTLSLASSQASGPALSRHLLTSFVSGLSDGMDSGYVEDSEESSSEWPWRRGSQERRGHRRPGQKFIRIYKLFKSTSQLVLRRDSRSLEGSSDTALPLRRAGSLCSPLDEPVSPPSRAQRSRSLPQPKLGTQLPSWLLAPASRPQRRRPFLSGDEDPKASTLRVVVFGSDRISGKVARAYSNLRRLENNRPLLTRFFKLQFFYVPVKRSHGTSPGACPPPRSQTPSPPTDSPRHASPGELGTTPWEESTNDISHYLGMLDPWYERNVLGLMHLPPEVLCQQSLKAEAQALEGSPTQLPILADMLLYYCRFAARPVLLQVYQTELTFITGEKTTEIFIHSLELGHSAATRAIKASGPGSKRLGIDGDREAVPLTLQIIYSKGAISGRSRWSNLEKVCTSVNLNKACRKQEELDSSMEALTLNLTEVVKRQNSKSKKGFNQISTSQIKVDKVQIIGSNSCPFAVCLDQDERKILQSVVRCEVSPCYKPEKSDLSSPPQTPPDLPAQAAPDLCSLLCLPIMTFSGALP

SEQ ID NO: 216 - protein, 726 aa, Homo sapien
PVPCVPSTVLLLNPVEVQAEFLAVANKLSTPGHSPHSAYTTLLLHAFQATFGAHCDVPGLHCRLQAKTLAELEDIFTETAEAQELASGIGDAAEARRWLRTKLQAVGEKAGFPGVLDTAKPGKLHTIPIPVARCYTYSWSQDSFDILQEILLKEQELLQPGILGDDEEEEEEEEEVEEDLETDGHCAERDSLLSTSSLASHDSTLSLASSQASGPALSRHLLTSFVSGLSDGMDSGYVEDSEESSSEWPWRRGSQERRGHRRPGQKFIRIYKLFKSTSQLVLRRDSRSLEGSSDTALPLRRAGSLCSPLDEPVSPPSRAQRSRSLPQPKLGTQLPSWLLAPASRPQRRRPFLSGDEDPKASTLRVVVFGSDRISGKVARAYSNLRRLENNRPLLTRFFKLQFFYVPVKRSHGTSPGACPPPRSQTPSPPTDSPRHASPGELGTTPWEESTNDISHYLGMLDPWYERNVLGLMHLPPEVLCQQSLKAEAQALEGSPTQLPILADMLLYYCRFAARPVLLQVYQTELTFITGEKTTEIFIHSLELGHSAATRAIKASGPGSKRLGIDGDREAVPLTLQIIYSKGAISGRSRWSNLEKVCTSVNLNKACRKQEELDSSMEALTLNLTEVVKRQNSKSKKGFNQISTSQIKVDKVQIIGSNSCPFAVCLDQDERKILQSVVRCEVSPCYKPEKSDLSSPPQTPPDLPAQAAPDLCSLLCLPIMTFSGALP

SEQ ID NO: 217 - protein, 88 aa, Homo sapien [sequence omitted]

SEQ ID NO: 218 - protein, 322 aa, Homo sapien
MLQFVRAGARAWLRPTGSQGLSSLAEEAARATENPEQVASEGLPEPVLRKVELPVPTHRRPVQAWVESLRGFEQERVGLADLHPDVFATAPRLDILHQVAMWQKNFKRISYAKTKTRAEVRGGGRKPWPQKGTGRARHGSIRSPLWRGGGVAHGPRGPTSYYYMLPMKVRALGLKVALTVKLAQDDLHIMDSLELPTGDPQYLTELAHYRRWGDSVLLVDLTHEEMPQSIVEATSRLKTFNLIPAVGLNVHSMLKHQTLVLTLPTVAFLEDKLLWQDSRYRPLWTPWKLIHYGGRCIEVLQTTLRFDDFLVELTEIKSCYTV

SEQ ID NO: 219 - protein, 345 aa, Homo sapien
  MISC_FEATURE (308)..(308): X=any amino acid
  MISC_FEATURE (310)..(311): X=any amino acid
RHPAAPREAPVALTSRGVGGCAAMLQFVRAGARAWLRPTGSQGLSSLAEEAARATENPEQVASEGLPEPVLRKVELPVPTHRRPVQAWVESLRGFEQERVGLADLHPDVFATAPRLDILHQVAMWQKNFKRISYAKTKTRAEVRGGGRKPWPQKGTGRARHGSIRSPLWRGGGVAHGPRGPTSYYYMLPMKVRALGLKVALTVKLAQDDLHIMDSLELPTGDPQYLTELAHYRRWGDSVLLVDLTHEEMPQSIVEATSRLKTFNLIPAVGLNVHSMLKHQTLVLTLPTVAFLEDKLLWQDSRYRPLWXPXXLIHYGGRCIEVLQTTLRFDDFLVELTEIKSCYTV

SEQ ID NO: 220 - protein, 278 aa, Homo sapien
MCRFSVHSRISICQTDVTIIENKIRIIIFQLFLVFEAWGCEAPAMGPQQAGSVVVTEPAVGQQRLQIVMIKVVPARASSAARAGLLWLGLALLGALHAQAQDSTSDLIPAPPLSKVPLQQNFQDNQFQGKWYVVGLAGNAILREDKDPQKMYATIYELKEDKSYNVTSVLFRKKKCDYWIRTFVPGCQPGEFTLGNIKSYPGLTSYLVRVVSTNYNQHAMVFFKKVSQNREYFKITLYGRTKELTSELKENFIRFSKSLGLPENHIVFPVPIDQCIDG

SEQ ID NO: 221 - protein, 102 aa, Homo sapien
RGRSKDSCKRWAARRVHAGNIKSYPGLTSYLVRVVSTNYNQHAMVFFKKVSQNREYFKITLYGRTKELTSELKENFIRFSKSLGLPENHIVFPVPIDQCIDG

SEQ ID NO: 222 - protein, 89 aa, Homo sapien
VPFLRKAHLSYPGLTSYLVRVVSTNYNQHAMVFFKKVSQNREYFKITLYGRTKELTSELKENFIRFSKSLGLPENHIVFPVPIDQCIDG

SEQ ID NO: 223 - protein, 82 aa, Homo sapien
MLPWEYPYVYLVRVVSTNYNQHAMVFFKKVSQNREYFKITLYGRTKELTSELKENFIRFSKSLGLPENHIVFPVPIDQCIDG

SEQ ID NO: 224 - protein, 82 aa, Homo sapien
ELPWEYPYVYLVRVVSTNYNQHAMVFFKKVSQNREYFKITLYGRTKELTSELKENFIRFSKSLGLPENHIVFPVPIDQCIDG

SEQ ID NO: 225 - protein, 396 aa, Homo sapien
MVYCYNNYFLRKTSFRNLVSMGYHLKTLTLNFTISNLQYSPDMGKGSATFNSTEGVLQHLLRPLFQKSSMGPFYLGCQLISLRPEKDGAATGVDTTCTYHPDPVGPGLDIQQLYWELSQLTHGVTQLGFYVLDRDSLFINGYAPQNLSIRGEYQINFHIVNWNLSNPDPTSSEYITLLRDIQDKVTTLYKGSQLHDTFRFCLVTNLTMDSVLVTVKALFSSNLDPSLVEQVFLDKTLNASFHWLGSTYQLVDIHVTEMESSVYQPTSSSSTQHFYLNFTITNLPYSQDKAQPGTTNYQRNKRNIEDALNQLFRNSSIKSYFSDCQVSTFRSVPNRHHTGVDSLCNFSPLARRVDRVAIYEEFLRMTRRAMVPSCRTSPWTGAVSLWMGILPTEMSP

SEQ ID NO: 226 - protein, 456 aa, Homo sapien
CYNNYFLRKTSFRNLVSMGYHLKTLTLNFTISNLQYSPDMGKGSATFNSTEGVLQHLLRPLFQKSSMGPFYLGCQLISLRPEKDGAATGVDTTCTYHPDPVGPGLDIQQLYWELSQLTHGVTQLGFYVLDRDSLFINGYAPQNLSIRGEYQINFHIVNWNLSNPDPTSSEYITLLRDIQDKVTTLYKGSQLHDTFRFCLVTNLTMDSVLVTVKALFSSNLDPSLVEQVFLDKTLNASFHWLGSTYQLVDIHVTEMESSVYQPTSSSSTQHFYLNFTITNLPYSQDKAQPGTTNYQRNKRNIEDALNQLFRNSSIKSYFSDCQVSTFRSVPNRHHTGVDSLCNFSPLARRVDRVAIYEEFLRMTRRAGTQLQNFTLDRSSVLVDGYSPNRNEPLTGNSDLPFWAVILIGLAGLLGLITCLICGVLVTTRRRKKEGEYNVQQQCPGYYQSHLDLEDLQ

SEQ ID NO: 227 - protein, 110 aa, Homo sapien
MWILAVKPIPQRLQGILTREPRLLLPRLACAPLPMLKEPWKPMLRDNVTLMGGWVGRRQAGRAGAAWGPLQPVLPWAHMGPVPTPLECLGDSSFHPWKMEINLRVGGVLG

SEQ ID NO: 228 - protein, 113 aa, Homo sapien
  MISC_FEATURE (26)..(26): X=any amino acid
  MISC_FEATURE (32)..(32): X=any amino acid
  MISC_FEATURE (37)..(38): X=any amino acid
  MISC_FEATURE (42)..(42): X=any amino acid
TVVIPDVDSGGEANSAKVTRHPHQGXRLLLPXGLRPXXCSRXWKPMLRDNVTLMGGWVGRRQAGRAGAAWGPLQPVLPWAHMGPVPTPLECLGDSSFHPWKMEINLRVGGVLG

SEQ ID NO: 229 - protein, 135 aa, Homo sapien
MNGGGVNGVRVEGRRRRMAIIIKGYVPPTGKSFAINFKVGSSGDIALHINPRMGNGTVVRNSLLNGSWGSEEKKITHNPFGPGQFFDLSIRCGLDRFKVYANGQHLFDFAHRLSAFQRVDTLEIQGDVTLSYVQI

SEQ ID NO: 230 - protein, 1590 aa, Homo sapien
MNYVPLTRDERTHEIKKLASESVYVVSLQSMNSQGRSQPVYRAALTKRKISEEDELDVPDDISVRVMSSQSVLVSWVDPVLEKQKKVVASRQYTVRYREKGELARWDYKQIANRRVLIENLIPDTVYEFAVRISQGERDGKWSTSVFQRTPESAPTTAPENLNVWPVNGKPTVVAASWDALPETEGKVKEYILSYAPALKPFGAKSLTYPGDTTSALVDGLQPGERYLFKIRATNRRGLGPHSKAFIVAMPTTSKADVQQNTEDNGKPEKPEPSSPSPRAPASSQHPSVPASPQGRNAKDLLLDLKNKILANGGAPRKPQLRAKKAEELDLQSTEITGEEELGSREDSPMSPSDTQDQKRTLRPPSRHGHSVVAPGRTAVRARMPALPRREGVDKPGFSLATQPRPGAPPSASASPAHHASTQGTSHRPSLPASLNDNDLVDSDEDERAVGSLHPKGAFAQPRPALSPSRQSPSSVLRDRSSVHPGAKPASPARRTPHSGAAEEDSSASAPPSRLSPPHGGSSRLLPTQPHLSSPLSKGGKDGEDAPATNSNAPSRSTMSSSVSSHLSSRTQVSEGAEASDGESHGDGDREDGGRQAEATAQTLRARPASGHFHLLRHKPFAANGRSPSRFSIGRGPRLQPSSSPQSTVPSRAHPRVPSHSDSHPKLSSGIHGDEEDEKPLPATVVNDHVPSSSRQPISRGWEDLRRSPQRGASLHRKEPIPENPKSTGADTHPQGKYSSLASKAQDVQQSTDADTEGHSPKAQPGSTDRHASPARPPAARSQQHPSVPRRMTPGRAPEQQPPPPVATSQHHPGPQSRDAGRSPSQPRLSLTQAGRPRPTSQGRSHSSSDPYTASSRGMLPTALQNQDEDAQGSYDDDSTEVEAQDVRAPAHAARAKEAAASLPKHQQGRQRRRWEPRQGREGACHRACPSRREPGSCEATSPPTSRQLPQGLPRPFPTAASQRCHREPRRGHPPLAAYTTRAPPGHFSTTPMLSLRQRMMHARFRNPLSRQPARPSYRQGYNGRPNVEGKVLPGSNGKPNGQRIINGPQGTKWVVDLDRGLVLNAEGRYLQDSHGNPLRIKLGGDGRTIVDLEGTPVVSPDGLPLFGQGRHGTPLANAQDKPILSLGGKPLVGLEVIKKTTHPPTTTMQPTTTTTPLPTTTTPRPTTATTRRTTTRRPTTTVRTTTRTTTTTTPKPTTPIPTCPPGTLERHDDDGNLIMSSNGIPECYAEEDEFSGLETDTAVPTEEAYVIYDEDYEFETSRPPTTTEPSTTATTPRVIPEEGAISSFPEEEFDLAGRKRFVAPYVTYLNKDPSAPCSLTDALDHFQVDSLDEIIPNDLKKSDLPPQHAPRNITVVAVEGCHSFVIVDWDKATPGDVVTGYLVYSASYEDFIRNKWSTQASSVTHLPIENLKPNTRYYFKVQAQNPHGYGPISPSVSFVTESDNPLLVVRPPGGEPIWIPFAFKHDPSYTDCHGRQYVKRTWYRKFVGVVLCNSLRYKIYLSDNLKDTFYSIGDSWGRGEDHCQFVDSHLDGTKMSLSTSKQVAFHICHRNQRRDGVGSPLENASLPGPLHLSSLQCHNLSDLVLSMIL

SEQ ID NO: 231 - protein, 1108 aa, Homo sapien
PGVVYFVLLTAENHSGVSRPVYRAESPPGGEWIEIDGFPIKGPGPFNETVTEKEVPNKPLRVRVRSSDDRLSVAWKAPRLSGAKSPRRSRGFLLGYGESGRKMNYVPLTRDERTHEIKKLASESVYVVSLQSMNSQGRSQPVYRAALTKRKISEEDELDVPDDISVRVMSSQSVLVSWVDPVLEKQKKVVASRQYTVRYREKGELARWDYKQIANRRVLIENLIPDTVYEFAVRISQGERDGKWSTSVFQRTPESAPTTAPENLNVWPVNGKPTVVAASWDALPETEGKVKEYILSYAPALKPFGAKSLTYPGDTTSALVDGLQPGERYLFKIRATNRRGLGPHSKAFIVAMPTTSKADVQQNTEDNGKPEKPEPSSPSPRAPASSQHPSVPASPQGRNAKDLLLDLKNKILANGGAPRKPQLRAKKAEELDLQSTEITGEEELGSREDSPMSPSDTQDQKRTLRPPSRHGHSVVAPGRTAVRARMPALPRREGVDKPGFSLATQPRPGAPPSASASPAHHASTQGTSHRPSLPASLNDNDLVDSDEDERAVGSLHPKGAFAQPRPALSPSRQSPSSVLRDRSSVHPGAKPASPARRTPHSGAAEEDSSASAPPSRLSPPHGGSSRLLPTQPHLSSPLSKGGKDGEDAPATNSNAPSRSTMSSSVSSHLSSRTQVSEGAEASDGESHGDGDREDGGRQAEATAQTLRARPASGHFHLLRHKPFAANGRSPSRFSIGRGPRLQPSSSPQSTVPSRAHPRVPSHSDSHPKLSSGIHGDEEDEKPLPATVVNDHVPSSSRQPISRGWEDLRRSPQRGASLHRKEPIPENPKSTGADTHPQGKYSSLASKAQDVQQSTDADTEGHSPKAQPGSTDRHASPARPPAARSQQHPSVPRRMTPGRAPEQQPPPPVATSQHHPGPQSRDAGRSPSQPRLSLTQAGRPRPTSQGRSHSSSDPYTASSRGMLPTALQNQDEDAQGSYDDDSTEVEAQDVRAPAHAARAKEAAASLPKHQQGRQRRRWEPRQGREGACHRACPSRREPGSCEATSPPTSRQLPQGLPRPFPTAASQRCHREPRRGHPPLAAVHHARPTWPLLHHPDAVLAPEDDACQIP

SEQ ID NO: 232 - protein, 103 aa, Homo sapien
EYLCAGVCVCVLCVCVCPVLGERSVAFEEVREKNHGTSGFLSLYSLAAIVCGHLMFFHTLLGRGGNDHPGQSPLPGMRPLRGGLAGQAPSGHPWMQPLDTCLL

SEQ ID NO: 233 - protein, 151 aa, Homo sapien
MWARNSHACELGMLSMSLLTWILFLIEFVILRDEKWGGNKTYTAYVDLEKDFAAEVVHPGDLKNSVEVALNKLLDPIREKFNTPAPGEHVFVKGYEKGQPDEELKPKKKVFEKLQADFKISEECIAQWKQTNFMTKLGSISCKSLKGGNIS

SEQ ID NO: 234 - protein, 351 aa, Homo sapien
MTYSVQFGDLWPSIRVSLLSEQKYGALVNNFAAWDHVSAKLEQLSAKDFVNEAISHWELQSEGGQSAAPSPASWACSPNLRCFTFDRRDNSASLLPEFVILRDEKWGGNKTYTAYVDLEKDFAAEVVHPGDLKNSVEVALNKLLDPIREKFNTPALKKLASAAYPDPSKQKPMAKGPAKNSEPEEVIPSRLDIRVGKIITVEKHPDADSLYVEKIDVGEAEPRTVVSGLVQFVPKEELQDRLVVVLCNLKPQKMRGVESQGMLLCASIEGINRQVEPLDPPAGSAPGEHVFVKGYEKGQPDEELKPKKKVFEKLQADFKISEECIAQWKQTNFMTKLGSISCKSLKGGNIS

SEQ ID NO: 235 - protein, 301 aa, Homo sapien
MKPSPTGNCSLRVANLQPHPLPPGPAVRTFDASLLTEGITVASLLPEFVILRDEKWGGNKTYTAYVDLEKDFAAEVVHPGDLKNSVEVALNKLLDPIREKFNTPALKKLASAAYPDPSKQKPMAKGPAKNSEPEEVIPSRLDIRVGKIITVEKHPDADSLYVEKIDVGEAEPRTVVSGLVQFVPKEELQDRLVVVLCNLKPQKMRGVESQGMLLCASIEGINRQVEPLDPPAGSAPGEHVFVKGYEKGQPDEELKPKKKVFEKLQADFKISEECIAQWKQTNFMTKLGSISCKSLKGGNIS

SEQ ID NO: 236 - protein, 199 aa, Homo sapien
MDPYICMKSHRVTTILAIIIWFLSSPAMVDGSWLDLAKRSKLEAQPFAHLTINATDIPSGSHKVSLSSWYHDRGWAKISNMTFSNGKLIVNQDGFYYLYANICFRHHETSGDLATEYLQLMVYVTKTSIKIPSSHTLMKGGSTKYWSGNSEFHFYSINVGGFFKLRSGEEISIEVSNPSLLDPDQDATYFGAFKVRDID

SEQ ID NO: 237 - protein, 761 aa, Homo sapien
MELLRTITYQPAASTKMCEQALGKGCGADSKKKRPPQPPEESQPPQSQAQVPPAAPHHHHHHSHSGPEISRIIVDPTTGKRYCRGKVLGKGGFAKCYEMTDLTNNKVYAAKIIPHSRVAKPHQREKIDKEIELHRILHHKHVVQFYHYFEDKENIYILLEYCSRRSMAHILKARKVLTEPEVRYYLRQIVSGLKYLHEQEILHRDLKLGKSLTPKAEFCVRVLFSLSVFFYILMFLIGILVSAILLLNGRLSYNNWLPGSKVDVCVLGENAFSKGFTFCFVYRLGNFFINEAMELKVGDFGLAARLEPLEHRRRTICGTPNYLSPEVLNKQGHGCESDIWALGCVMYTMLLGRPPFETTNLKETYRCIREARYTMPSSLLAPAKHLIASMLSKNPEDRPSLDDIIRHDFFLQGFTPDRLSSSCCHTVPDFHLSSPAKNFFKKAAAALFGGKKDKARYIDTHNRVSKEDEDIYKLRHDLKKTSITQQPSKHRTDEELQPPTTTVARSGTPAVENKQQIGDAIRMIVRGTLGSCSSSSECLEDSTMGSVADTVARVLRGCLENMPEADCIPKEQLSTSFQWVTKWVDYSNKYGFGYQLSDHTVGVLFNNGAHMSLLPDKKTVHYYAELGQCSVFPATDAPEQFISQVTVLKYFSHYMEENLMDGGDLPSVTDIRRPRLYLLQWLKSDKALMMLFNDGTFQVNFYHDHTKIIICSQNEEYLLTYINEDRISTTFRLTTLLMSGCSSELKNRMEYALNMLLQRCN

SEQ ID NO: 238 - protein, 752 aa, Homo sapien
MELLRTITYQPAASTKMCEQALGKGCGADSKKKRPPQPPEESQPPQSQAQVPPAAPHHHHHHSHSGPEISRIIVDPTTGKRYCRGKVLGKGGFAKCYEMTDLTNNKVYAAKIIPHSRVAKPHQREKIDKEIELHRILHHKHVVQFYHYFEDKENIYILLEYCSRRKGKCQLLFENICLPRINMVFKEYFIWDFSCGSTYTAKLTFICSSCKGKPVILITVLTDSLFSFSSSESMAHILKARKVLTEPEVRYYLRQIVSGLKYLHEQEILHRDLKLGNFFINEAMELKVGDFGLAARLEPLEHRRRTICGTPNYLSPEVLNKQGHGCESDIWALGCVMYTMLLGRPPFETTNLKETYRCIREARYTMPSSLLAPAKHLIASMLSKNPEDRPSLDDIIRHDFFLQGFTPDRLSSSCCHTVPDFHLSSPAKNFFKKAAAALFGGKKDKARYIDTHNRVSKEDEDIYKLRHDLKKTSITQQPSKHRTDEELQPPTTTVARSGTPAVENKQQIGDAIRMIVRGTLGSCSSSSECLEDSTMGSVADTVARVLRGCLENMPEADCIPKEQLSTSFQWVTKWVDYSNKYGFGYQLSDHTVGVLFNNGAHMSLLPDKKTVHYYAELGQCSVFPATDAPEQFISQVTVLKYFSHYMEENLMDGGDLPSVTDIRRPRLYLLQWLKSDKALMMLFNDGTFQVNFYHDHTKIIICSQNEEYLLTYINEDRISTTFRLTTLLMSGCSSELKNRMEYALNMLLQRCN

SEQ ID NO: 239 - protein, 399 aa, Homo sapien
MRNKKILKEDELLSETQQAAFHQIAMEPFEINGLQGHKGAMGMPGAPGPPGPPAEKGAKGAMGRDGATGPSGPQGPPGVKGEAGLQGPQGAPGKQGATGTPGPQGEKGSKGDGGLIGPKGETGTKGEKGDLGLPGSKGDRGMKGDAGVMGPPGAQGSKGDFGRPGPPGLAGFPGAKGDQGQPGLQGVPGPPGAVGHPGAKGEPGSAGSPGRAGLPGSPGSPGATGLKGSKGDTGLQGQQGRKGESGVPGPAGVKGEQGSPGLAGPKGAPGQAGQKGDQGVKGSSGEQGVKGEKGERGENSVSVRIVGSSNRGRAEVYYSGTWGTICDDEWQNSDAIVFCRMLGYSKGRALYKVGAGTGQIWLDNVQCRGTESTLWSCTKNSWGHHDCSHEEDAGVECSV

SEQ ID NO: 240 - protein, 433 aa, Homo sapien
MRNKKILKEDELLSETQQAAFHQIAMEPFEINVPKPKRRNGVNFSLAVVVIYLILLTAGAGLLVVQGLQGHKGAMGMPGAPGPPGPPAEKGAKGAMGRDGATGPSGPQGPPGVKGEAGLQGPQGAPGKQGATGTPGPQGEKGSKGDGGLIGPKGETGTKGEKGDLGLPGSKGDRGMKGDAGVMGPPGAQGSKGDFGRPGPPGLAGFPGAKGDQGQPGLQGVPGPPGAVGHPGAKGEPGSAGSPGRAGLPGSPGSPGATGLKGSKGDTGLQGQQGRKGESGVPGPAGVKGEQGSPGLAGPKGAPGQAGQKGDQGVKGSSGEQGVKGEKGERGENSVSVRIVGSSNRGRAEVYYSGTWGTICDDEWQNSDAIVFCRMLGYSKGRALYKVGAGTGQIWLDNVQCRGTESTLWSCTKNSWGHHDCSHEEDAGVECSV
